(19) United States
(12) Patent Application Publication
(10) Pub. No.: US 2021/0130833 A1
(43) Pub. Date: May 6, 2021

(54) BACTERIAL DEFENSE SYSTEMS AND METHODS OF IDENTIFYING THEREOF

(71) Applicants: THE BROAD INSTITUTE, INC., Cambridge, MA (US); MASSACHUSETTS INSTITUTE OF TECHNOLOGY, Cambridge, MA (US)

(72) Inventors: Feng Zhang, Cambridge, MA (US); Linyi Gao, Cambridge, MA (US)

(73) Assignees: THE BROAD INSTITUTE, INC., Cambridge, MA (US); MASSACHUSETTS INSTITUTE OF TECHNOLOGY, Cambridge, MA (US)

(21) Appl. No.: 17/085,937

(22) Filed: Oct. 30, 2020

Related U.S. Application Data
(60) Provisional application No. 62/928,269, filed on Oct. 30, 2019.
(60) Provisional application No. 63/051,161, filed on Jul. 13, 2020.

(51) Int. Cl. C12N 15/70; C12Q 1/689; C12N 9/14; C12N 9/78; C12N 9/12; C12N 9/22

(52) U.S. Cl. CPC C12N 15/70; C12Q 1/689; C12N 9/14; C12Y 306/01003; C12N 9/78; C12N 2800/80; C12N 9/1276; C12Y 207/07049; C12N 9/22; C07K 2319/00; C12Y 305/04004

(57) ABSTRACT

Engineered systems comprising components of defense systems identified in prokaryotes are provided.

### CROSS-REFERENCE TO RELATED APPLICATIONS

[0001] This application claims the benefit of U.S. Provisional Application No. 62/928,269, filed Oct. 30, 2019, and U.S. Provisional Application No. 63/051,161, filed Jul. 13, 2020. The entire contents of the above-identified applications are hereby fully incorporated herein by reference.

### STATEMENT REGARDING FEDERALLY SPONSORED RESEARCH

[0002] This invention was made with government support under Grant Nos. HG009761, MH110049, and HL141201 awarded by the National Institutes of Health. The government has certain rights in the invention.

### REFERENCE TO AN ELECTRONIC SEQUENCE LISTING

[0003] The contents of the electronic sequence listing (“BROD-4610US_ST25.txt”; Size is 2,039,992 bytes and it was created on Oct. 30, 2020) is herein incorporated by reference in its entirety.

### TECHNICAL FIELD

[0004] The subject matter disclosed herein is generally directed to bacterial defense systems and methods of identifying thereof.

### BACKGROUND

[0005] To survive from attacks by viruses (e.g., phages), bacteria have developed a variety of defense systems, including proteins and nucleic acids that help recognize and eliminate foreign proteins and nucleic acids, e.g., those from the infecting phages. A number of bacteria defense systems have been discovered, many of which have been adopted and engineered to tools in biotechnology. An example is the CRISPR-Cas systems, which recognize and cleave foreign RNA or DNA in bacteria and have been developed as a powerful gene editing tool. In view of the great potential of bacterial defense systems in biotechnology and new therapeutic or diagnostic applications, there is a need for identification of novel defense systems in a high throughput manner.

### SUMMARY

[0006] In one aspect, the present disclosure provides an engineered system comprising an ATPase and an adenosine deaminase. In some embodiments, the ATPase comprises a sequence of WP_012906049.1 or WP_155731552.1, and the adenosine deaminase comprises a sequence of WP_012906048.1 or WP_064360593.1. In some embodiments, the ATPase comprises 1100 or less amino acid residues. In some embodiments, the adenosine deaminase comprises 1100 or less amino acid residues. In some embodiments, the system further comprises a membrane protein. In some embodiments, the membrane protein comprises a SLATT domain or Csx27. In some embodiments, the system is configured to modify a target nucleic acid. In some embodiments, the target nucleic acid is RNA. In some embodiments, the modification of the target nucleic acid comprises causing an A to G mutation in the target nucleic acid. In some embodiments, the system further comprises one or more phage proteins. In some embodiments, the one or more phage proteins are in Tables 18A-18B.

[0007] In another aspect, the present disclosure provides an engineered system comprising one or more reverse transcriptases comprising one or more UG1, UG2, UG3, UG8, UG15, or UG16 reverse transcriptase. In some embodiments, the system comprises a first and a second reverse transcriptase. In some embodiments, the first and the second reverse transcriptases are comprised in a protein. In some embodiments, the system further comprises a SLATT domain. In some embodiments, the system further comprises a DNA polymerase. In some embodiments, the DNA polymerase is a family A DNA polymerase. In some embodiments, the system further comprises a serine protease domain linked to or associated with the reverse transcriptase. In some embodiments, the system further comprises an MBL domain. In some embodiments, the system further comprises a nitrilase. In some embodiments, the nitrilase and the one or more reverse transcriptases are comprised in a protein, and the nitrilase is at a C-terminus of the protein. In some embodiments, the system further comprises a non-coding RNA element. In some embodiments, the reverse transcriptase comprises an active site, e.g., (Y/F)×DD (SEQ ID NO: 1-2), where X is any amino acid.

[0008] In another aspect, the present disclosure provides an engineered system comprising a retron or one or more molecules encoded by the retron. In some embodiments, the retron is an Ec67 retron. In some embodiments, the retron is an Ec86 retron. In some embodiments, the retron is an Ec78 retron. In some embodiments, the retron is a Tol/interleukin 1 receptor (TIR) domain-associated retron. In some embodiments, the TIR domain has NAD+ hydrolase activity. In some embodiments, the retron is a topoisomerase-primase (TOPRIM) domain-associated retron. In some embodiments, the TOPRIM domain has nuclease activity.

[0009] In another aspect, the present disclosure provides an engineered system comprising an NTPase of a STAND (signal transduction ATPases with numerous associated domains) superfamily. In some embodiments, the system further comprises DUF4297, Mrr-like nuclease, SIR2, a trypsin-like serine protease, and/or a helical domain.

[0010] In another aspect, the present disclosure provides an engineered system comprising a von Willebrand factor (VWF), a PP2C-like serine/threonine protein phosphatase, and a serine/threonine kinase.

[0011] In another aspect, the present disclosure provides an engineered system comprising SIR2 or a function domain thereof.

[0012] In another aspect, the present disclosure provides an engineered system comprising a transmembrane ATPase.

[0013] In another aspect, the present disclosure provides an engineered system comprising an ATPase, QueC synthase, and TatD endonuclease.

[0014] In another aspect, the present disclosure provides an engineered system comprising a S8 peptidase.

[0015] In another aspect, the present disclosure provides an engineered system comprising DUF4011, a helicase, an a Vsr endonuclease.

[0016] In another aspect, the present disclosure provides an engineered system comprising a silent information regulator (SIR)2-DUF4020.

[0017] In another aspect, the present disclosure provides an engineered system comprising a Polymerase and Histidinol Phosphatase (PHP)-ATPase.

[0018] In another aspect, the present disclosure provides an engineered system comprising SIR2 and HerA.

[0019] In another aspect, the present disclosure provides an engineered system comprising DUF4297 and HerA.

[0020] In another aspect, the present disclosure provides an engineered system comprising DUF 1887.

[0021] In another aspect, the present disclosure provides an engineered system comprising DUF499, DUF3780, and DUF1156 methyltransferase and a helicase.

[0022] In another aspect, the present disclosure provides an engineered system comprising a type I-E CRISPR-associated ATPase.

[0023] In another aspect, the present disclosure provides an engineered system comprising ApeA.

[0024] In some embodiments, any one of the systems herein comprises two proteins fused together. In some embodiments, any one of the systems herein comprises one or more components in a retrotransposon system.

[0025] In another aspect, the present disclosure provides a polynucleotide comprising coding sequences for one or more proteins in the system herein.

[0026] In another aspect, the present disclosure provides a vector comprising a polynucleotide herein.

[0027] In another aspect, the present disclosure provides a cell comprising the polynucleotide herein.

[0028] In another aspect, the present disclosure provides a method of identifying a defense system in a microorganism, the method comprising: identifying genes of known defense systems in a plurality of genomes of the microorganism; recording candidate genes located within 10 kb or 10 open reading frames from the identified genes of known defense systems in the genomes; identifying homologs of each candidate gene in the genomes; and selecting candidate genes, wherein at least 10% of homologs of the candidate genes are within 5000 nucleotides or 5 genes from one or more known defense systems on the genomes.

[0029] In some embodiments, identifying genes of known defense systems comprises identifying known defense genes and filtering false positive hits among the identified known defense genes. In some embodiments, the method further comprises validating the selected candidate genes. In some embodiments, the homologs of the candidate genes share at least 70% sequence identity with the candidate genes and/or the homologs have an e-value of 10⁻⁵ or lower. In some embodiments, the recorded candidate genes are within 10 kb from the identified genes of known defense systems on the genomes. In some embodiments, at least 15% of homologs of the selected candidate genes are within 5000 nucleotides or 5 genes from one or more known defense systems on the genomes. In some embodiments, the plurality of genomes comprises at least 100,000 genomes. In some embodiments, the known defense systems comprise one or more of a CRISPR system, Type I RM and McrBC system, BREX-associated system, Zorya system, Wadjet system, Druantia-associated system, Hachiman system, Lamassu system, Thoeris-like system, Gabija system, Septu system, pAgo system, Shedu system, Kiwa system, DUF499-DUF1156 system, and Toxin/antitoxin system. In some embodiments, the microorganism is E. coli.

[0030] These and other aspects, objects, features, and advantages of the example embodiments will become apparent to those having ordinary skill in the art upon consideration of the following detailed description of illustrated example embodiments.

### BRIEF DESCRIPTION OF THE DRAWINGS

[0031] An understanding of the features and advantages of the present invention will be obtained by reference to the following detailed description that sets forth illustrative embodiments, in which the principles of the invention may be utilized, and the accompanying drawings of which:

[0032] FIGS. 1A-1Y. FIG. 1A shows diagrams of exemplary identified defense system comprising reverse transcriptase and nitrilase. FIG. 1B shows diagrams of exemplary identified defense system comprising a reverse transcriptase and a nitrilase, and a topoisomerase-primase (TOPRIM). FIG. 1C shows diagrams of exemplary identified defense system comprising a reverse transcriptase and TOPRIM. FIG. 1D shows diagrams of exemplary identified defense system comprising a reverse transcriptase. FIG. 1E shows diagrams of exemplary identified defense system comprising a deaminase. FIG. 1F shows diagrams of exemplary identified defense system comprising a transmembrane ATPase. FIG. 1G shows diagrams of exemplary identified defense system comprising an ATPase, QueC synthase, and TatD endonuclease. FIG. 1H shows diagrams of exemplary identified defense system comprising a protease. FIG. 1I shows diagrams of exemplary identified defense system comprising DUF4011 domain. FIG. 1J shows diagrams of exemplary identified defense system comprising an Hsp90 ATPase and SF2-family helicase. FIG. 1K shows diagrams of exemplary identified defense system comprising trypsin-STAND. FIG. 1L shows diagrams of exemplary identified defense system comprising DUF4297-STAND and another protein. FIG. 1M shows diagrams of another exemplary identified defense system comprising DUF4297-STAND. FIG. 1N shows diagrams of exemplary identified defense system comprising a STAND ATPase. FIG. 1O shows diagrams of another exemplary identified defense system comprising Mrr-STAND. FIG. 1P shows diagrams of exemplary identified defense system comprising VWA, phosphatase, and kinase. FIG. 1Q shows diagrams of exemplary identified defense system comprising SIR2 and a DUF4020 domain. FIG. 1R shows diagrams of exemplary identified defense system comprising SIR2. FIG. 1S shows diagrams of exemplary identified defense system comprising SIR2-STAND. FIG. 1T shows diagrams of exemplary identified defense system comprising PHP-ATPase. FIG. 1U shows diagrams of exemplary identified defense system comprising SIR2 and HerA. FIG. 1V shows diagrams of exemplary identified defense system comprising DUF1887. FIG. 1W shows diagrams of exemplary identified defense system comprising a CRISPR-associated enzyme and an ATPase. FIG. 1X shows diagrams of exemplary identified defense system comprising reverse transcriptase and a protease. FIG. 1Y shows figure legends used in FIGS. 1A-1X.

[0033] FIG. 2 shows diagrams of exemplary identified defense system comprising reverse transcriptase and amidase.

[0034] FIG. 3 shows diagrams of exemplary identified defense systems that comprise reverse transcriptase.

[0035] FIG. 4 shows an exemplary method of identifying defense systems.

[0036] FIG. 5 shows another exemplary method of identifying defense systems.

[0037] FIGS. 6A-6B show the examples of the identified bacterial defense systems, their domain structures, and their effects on phage growth.

[0038] FIG. 7 shows selected identified bacterial defense systems and mutated forms, and their effects on phage growth.

[0039] FIGS. 8A-8C: Domain-independent identification of novel systems that were enriched in defense islands. (FIG. 8A) Computational pipeline to identify uncharacterized putative defense systems across all sequenced bacterial and archaeal genomes. Defense systems were identified based on de novo analysis of amino acid sequences, independent of pre-existing protein domain annotations. Histograms of defense association probabilities for (FIG. 8B) selected known systems used as control and (FIG. 8C) novel seed genes (minimum 50 identified homologs). Seeds to the right of the dashed line (0.15) were selected for further analysis.

[0040] FIGS. 9A-9B: Experimental validation of 29 novel defense gene cassettes. (FIG. 9A) Experimental validation pipeline using phage plaque assays on E. coli heterologously expressing a cloned candidate defense system. (FIG. 9B) Anti-phage activity across a diverse panel of coliphages with dsDNA, ssDNA, and ssRNA genomes (mean of n=2 replicates). Also shown is a bar graph of the abundance of each system within sequenced bacterial and archaeal genomes. See also FIGS. 12-13.

[0041] FIGS. 10A-10E: RADAR employs a divergent adenosine deaminase that edits RNA in response to phage infection. (FIG. 10A) Examples of genomic loci containing three subtypes of RADAR (standalone, Csx27-associated, and SLATT-associated). (FIG. 10B) Mutations at putative rdrA and rdrB active sites abolish activity against phage T5. (FIG. 10C) Representative RNAseq reads from E. coli expressing either RADAR or an empty vector control. (FIG. 10D) Examples of editing sites in the host and phage RNA, with identified RNA secondary structures. (FIG. 10E) Growth kinetics of RADAR-containing E. coli in comparison with an empty vector control under varying multiplicity of infection (MOI).

[0042] FIGS. 11A-11C: A diversity reverse transcriptases (RTs) mediate antiviral immunity. (FIG. 11A) Examples of genomic loci containing novel antiviral RTs. Three validated RT systems are shown (with two representative subtypes for each system). Domain architectures and component essentiality of (FIG. 11B) non-retron RTs and (FIG. 11C) retron-like RTs. See also FIG. 15.

[0043] FIG. 12: Novel defense systems with diverse domain architectures. Graphics show domains identified using HHpred, with mutations at active sites.

[0044] FIG. 13: Representative plaques for phages T3, T7, φV-1, and φX174 (n=2 replicates) on E. coli strain C, corresponding to the right panel of FIG. 9B. A total of 5×10⁶ virions were deposited per spot, and images were acquired after 68 h incubation at 37° C.

[0045] FIG. 14: Abundance of defense systems within sequenced genomes stratified by phylum. Defense system homologs were predicted using a two-step HMM-based search across all sequenced bacterial and archaeal genomes in Genbank.

[0046] FIG. 15: Anti-phage defense activity for two RT-containing systems 28 and 29 (see also FIGS. 11A-11C). Ten-fold serial dilutions of phage were spotted on a soft agar overlay containing E. coli. D313 is the putative conserved active site aspartate for the family A DNA polymerase PolA.

[0047] FIGS. 16A-16C: Domain-independent prediction of putative antiviral defense systems. (FIG. 16A) Computational pipeline to identify uncharacterized putative defense systems across all sequenced bacterial and archaeal genomes. Defense systems were predicted based on analysis of amino acid sequences, independent of domain annotations. (FIG. 16B) Histograms of defense association frequencies before filtering and after neighborhood context-based filtering (minimum 50 homologs). Seeds to the right of the dashed line (0.1) were selected for further analysis. (FIG. 16C) Pie chart of the domain diversity among predicted defense genes, based on additional analysis using HHpred against pfam domains.

[0048] FIGS. 17A-17D: Candidate defense systems exhibit antiviral activity in a heterologous system. (FIG. 17A) Experimental validation pipeline using phage plaque assays on E. coli heterologously expressing a cloned candidate defense system. Example plaques (FIG. 17B) and zones of lysis (FIG. 17C) for six candidate defense systems. (FIG. 17D) Anti-phage activity across a panel of 12 coliphages with dsDNA, ssDNA, and ssRNA genomes (mean of n=2 replicates). The bar graph shows the abundance of each system within sequenced bacterial and archaeal genomes. Domains: MTase: methyltransferase; RT: reverse transcriptase; TIR: Toll/interleukin-1 receptor homology domain; TOPRIM: topoisomerase-primase domain; QueC: 7-cyano-7-deazaguanine synthase-like domain; SIR2: sirtuin; S/T phos: serine/threonine protein phosphatase; membrane: transmembrane helix; DUF: domain of unknown function. Proposed gene names (underlined): DRT: defense-associated reverse transcriptase; RADAR: phage restriction by ADAR; AVAST: antiviral ATPase/NTPase of the STAND superfamily; drs: defense-associated sirtuin; tmn: transmembrane NTPase; qat: QueC-like associated with ATPase and TatD DNAase; hhe: HEPN, helicase, and Vsr endonuclease; mza: MutL, Z1, and AIPR; upx: uncharacterized (P)D-(D/E)-XK defense protein; ppl: polymerase/histidinol phosphatase-like.

[0049] FIGS. 18A-18F: RADAR mediates RNA editing in response to phage infection. (FIG. 18A) Examples of genomic loci containing three subtypes of RADAR (standalone, Csx27-associated, and SLATT-associated). (FIG. 18B) Essentiality of the core RADAR genes rdrAB and the accessory gene rdrD against phages T2 and T5. (FIG. 18C) Representative RNAseq reads from E. coli expressing either RADAR or an empty vector control. (FIG. 18D) Expression of phage T2 RNA relative to total host RNA in E. coli containing RADAR. Each dot represents a phage gene. Cells were infected at a multiplicity of infection (MOI) of 2. The p value was determined by a Wilcoxon signed-rank test. (FIG. 18E) Representative editing sites in the host and phage transcriptomes, with corresponding predicted RNA secondary structures. (FIG. 18F) Growth kinetics of RADAR-containing E. coli in comparison with an empty vector control under varying MOI by phage T2.

[0050] FIGS. 19A-19E: Diverse families of reverse transcriptases (RTs) mediate antiviral defense. (FIG. 19A) Examples of genomic loci containing two validated RT systems (DRT type 1 and type 3), with two representative subtypes shown for each system. (FIG. 19B) Essential components of non-retron RTs (left panel) and retrons (right panel). (FIG. 19C) Effect of defense RTs on the expression of phage T2 genes in E. coli infected at an MOI of 2. (FIG. 19D) RNAseq reads mapping to the DRT type 3 system. (FIG. 19E) Predicted secondary structure of the highly expressed non-coding RNA identified in (FIG. 19D).

[0051] FIG. 20: Domain architectures and mutational analysis of additional defense systems. Graphics show domains identified using HHpred, and stars indicate locations of active site mutations. Bar graphs (n=4 replicates per bar) show either log₁₀ fold change of efficiency of plating (for phages T2, P1, and λ) or log₂ fold change in the area of the zone of lysis (for phages T7 and φV-1) relative to the empty vector control. MBL: metallo β-lactamase; SIR2: sirtuin; HerA: helicase; QueC: 7-cyano-7-deazaguanine synthase-like domain; TatD: DNAse; vWA: von Willebrand factor type A; PHP: polymerase/histidinol phosphatase; MTase: methyltransferase; PLD: phospholipase D.

[0052] FIGS. 21A-21C: Selection of filtering thresholds for prediction of putative defense genes. Contour density plots for predicted (FIG. 21A) toxin-antitoxin/abi genes, (FIG. 21B) mobilome genes, and (FIG. 21C) CRISPR-Cas genes. Boxes indicated the parameter thresholds selected for filtering putative defense genes.

[0053] FIG. 22: Summary of tested homologs of candidate defense systems, stratified by source organism (Enterobacteriaceae vs. non-Enterobacteriaceae). Systems 1-29 correspond to the numbering in FIG. 17D.

[0054] FIG. 23: Representative zones of lysis for phages T3, T7, V-1, and X174 on E. coli strain C (n=2 replicates each), corresponding to the right panel of FIG. 2D. A total of 5×106 virions were deposited per spot.

[0055] FIG. 24: Abundance of validated defense systems within sequenced genomes, stratified by phylum. Defense system homologs were predicted using a two-step HMM-based search across all bacterial and archaeal genomes in Genbank (see Methods).

[0056] FIGS. 25A-25B: Domain and locus architecture of the RADAR deaminase. (FIG. 25A) Unrooted neighbor-joining tree of RdrB homologs with the Jukes-Cantor genetic distance model. Distinct clades of RADAR incorporate accessory membrane proteins RdrC (Csx27) or RdrD (SLATT). (FIG. 25B) RdrB contains a split deaminase domain (red) with uncharacterized insertions. Domain boundaries were predicted using HHpred. Percent identity was calculated from a multiple sequence alignment of 535 representative homologs with at most 98% pairwise similarity.

[0057] FIGS. 26A-26B: Deamination by the RADAR system occurs only on adenosines within RNA and requires both RADAR genes. (FIG. 26A) Empirical probability mass functions of editing frequency for each of the 12 possible RNA base changes, calculated using the highest-expressed mRNAs in the transcriptome of E. coli K-12 (ATCC25404) expressing the RADAR system from Citrobacter rodentium DBS100. Cells were harvested 1 hr after infection by phage T2 at an MOI of 2. (FIG. 26B) Editing frequency at a selected site within the transfer messenger RNA (tmRNA) locus (RNA or DNA). Sequences below the graphs show representative reads.

[0058] FIG. 27: RADAR preferentially deaminates adenosines within loop regions of RNA stem-loops. Predicted RNA secondary structures of the 48 highest-expressed strong RADAR editing sites (50% editing).

[0059] FIGS. 28A-28F: Effect of expression of specific phage genes on RNA editing by RADAR. (FIG. 28A) Phage genes were cloned after IPTG-inducible T7 promoter and transformed into E. coli heterologously expressing the RADAR system from Citrobacter rodentium DBS100. (FIG. 28B) Structure of E. coli transfer messenger RNA (tmRNA) (PDBID: 6Q9A), highlighting adenosines strongly edited by RADAR. (FIG. 28C) Scatter plots of RNA editing frequencies for two replicates. Each dot represents a different phage fragment. (FIG. 28D) Locations of fragments on the phage T2 genome. Each colored box represents a distinct fragment. (FIG. 28E) RNA editing frequencies of the fragments shown in (FIG. 28D) at A93 and A121 of the E. coli tmRNA. (FIG. 28F) RNA editing frequencies induced by expression of RADAR with individual genes within six of the highest-activity fragments identified in (FIG. 28D). Purple squares indicate active site mutants created by site-directed mutagenesis. dam=DNA adenine methyltransferase; a-gt: DNA alpha glucosyltransferase; gp50: head completion protein; gp2: DNA end protector protein; frd: dihydrofolate reductase; rnh: RNase H; dsbA: dsDNA binding protein; denA: endonuclease II.

[0060] FIGS. 29A-29C: Mutational analysis of three RT-containing defense systems. Active site mutations abolish defense activity against phage T5 for the (FIG. 29A) RT (UG2), (FIG. 29B) RT (UG15), and (FIG. 29C) retron+ATPase+HNH (Ec78) systems. The ATPase and HNH proteins in Ec78 comprise the Septu defense system.

[0061] FIGS. 30A-30C: The nitrilase domain of the RT (UG1) defense system forms a distinct Glade among nitrilase enzymes. (FIG. 30A) Stacked histogram of E-values of sequence-profile matches (RPSBLAST) between prokaryotic proteins in Genbank against a custom position-specific scoring matrix for the RT (UG1) nitrilase domain (minimum 20% coverage). Proteins matching a known nitrilase PSSM from the CDD database (E-value −10⁻⁶; minimum 40% coverage) are shown in green. (FIG. 30B) Unrooted neighbor-joining tree of the reverse transcriptase (RT) domain in nitrilase-associated RTs (n=588). Colors indicate distinct clades (cutoff tree distance 0.15). (FIG. 30C) Unrooted neighbor-joining tree of the nitrilase domain in proteins in (FIG. 30B) with the same color scheme (based on RT domain Glade). Also included in the tree are the non-RT-associated nitrilases (green) that are most similar to the nitrilase domain in RT (UG1) among all prokaryotic proteins.

[0062] FIG. 31: Effect of mutations in the multi-copy single-stranded DNA (msDNA) hairpin on defense activity for the Ec86 retron from E. coli BL21.

[0063] FIGS. 32A-32B: Bacterial densities over time for (FIG. 32A) retron-TIR, RT-nitrilase (UG1), and RT (UG3)+RT (UG8) defense systems infected with phage T2 and (FIG. 32B) additional defense systems infected with phage T7.

[0064] FIGS. 33A-33C: Phage and prophage association frequencies for validated defense system clusters. (FIG. 33A) Overall association frequency for 28 defense systems in this study. The rexA immunity gene from phage lambda is shown in red. (FIG. 33B) Per-system analysis of the distribution of phage association frequencies for each associated cluster in (FIG. 33A). (FIG. 33C) Example of the transmembrane ATPase located within an incomplete prophage.

[0065] The figures herein are for illustrative purposes only and are not necessarily drawn to scale.

### DETAILED DESCRIPTION OF THE EXAMPLE EMBODIMENTS

### General Definitions

[0066] Unless defined otherwise, technical and scientific terms used herein have the same meaning as commonly understood by one of ordinary skill in the art to which this disclosure pertains. Definitions of common terms and techniques in molecular biology may be found in Molecular Cloning: A Laboratory Manual, 2^{nd} edition (1989) (Sambrook, Fritsch, and Maniatis); Molecular Cloning: A Laboratory Manual, 4^{th} edition (2012) (Green and Sambrook); Current Protocols in Molecular Biology (1987) (F. M. Ausubel et al. eds.); the series Methods in Enzymology (Academic Press, Inc.): PCR 2: A Practical Approach (1995) (M. J. MacPherson, B. D. Hames, and G. R. Taylor eds.): Antibodies, A Laboratory Manual (1988) (Harlow and Lane, eds.): Antibodies A Laboratory Manual, 2^{nd} edition 2013 (E. A. Greenfield ed.); Animal Cell Culture (1987) (R. I. Freshney, ed.); Benjamin Lewin, Genes IX, published by Jones and Bartlet, 2008 (ISBN 0763752223); Kendrew et al. (eds.), The Encyclopedia of Molecular Biology, published by Blackwell Science Ltd., 1994 (ISBN 0632021829); Robert A. Meyers (ed.), Molecular Biology and Biotechnology: a Comprehensive Desk Reference, published by VCH Publishers, Inc., 1995 (ISBN 9780471185710); Singleton et al., Dictionary of Microbiology and Molecular Biology 2^{nd} ed., J. Wiley & Sons (New York, N.Y. 1994), March, Advanced Organic Chemistry Reactions, Mechanisms and Structure 4th ed., John Wiley & Sons (New York, N.Y. 1992); and Marten H. Hofker and Jan van Deursen, Transgenic Mouse Methods and Protocols, 2^{nd} edition (2011).

[0067] As used herein, the singular forms “a”, “an”, and “the” include both singular and plural referents unless the context clearly dictates otherwise.

[0068] The term “optional” or “optionally” means that the subsequent described event, circumstance or substituent may or may not occur, and that the description includes instances where the event or circumstance occurs and instances where it does not.

[0069] The recitation of numerical ranges by endpoints includes all numbers and fractions subsumed within the respective ranges, as well as the recited endpoints.

[0070] The term “about” in relation to a reference numerical value and its grammatical equivalents as used herein can include the numerical value itself and a range of values plus or minus 10% from that numerical value. For example, the amount “about 10” includes 10 and any amounts from 9 to 11. For example, the term “about” in relation to a reference numerical value can also include a range of values plus or minus 10%, 9%, 8%, 7%, 6%, 5%, 4%, 3%, 2%, or 1% from that value. As used herein, a “biological sample” may contain whole cells and/or live cells and/or cell debris. The biological sample may contain (or be derived from) a “bodily fluid”. The present invention encompasses embodiments wherein the bodily fluid is selected from amniotic fluid, aqueous humour, vitreous humour, bile, blood serum, breast milk, cerebrospinal fluid, cerumen (earwax), chyle, chyme, endolymph, perilymph, exudates, feces, female ejaculate, gastric acid, gastric juice, lymph, mucus (including nasal drainage and phlegm), pericardial fluid, peritoneal fluid, pleural fluid, pus, rheum, saliva, sebum (skin oil), semen, sputum, synovial fluid, sweat, tears, urine, vaginal secretion, vomit and mixtures of one or more thereof. Biological samples include cell cultures, bodily fluids, cell cultures from bodily fluids. Bodily fluids may be obtained from a mammal organism, for example by puncture, or other collecting or sampling procedures.

[0071] The terms “subject,” “individual,” and “patient” are used interchangeably herein to refer to a vertebrate, preferably a mammal, more preferably a human. Mammals include, but are not limited to, murines, simians, humans, farm animals, sport animals, and pets. Tissues, cells and their progeny of a biological entity obtained in vivo or cultured in vitro are also encompassed.

[0072] The term “exemplary” is used herein to mean serving as an example, instance, or illustration. Any aspect or design described herein as “exemplary” is not necessarily to be construed as preferred or advantageous over other aspects or designs. Rather, use of the word exemplary is intended to present concepts in a concrete fashion.

[0073] As used herein, when an enzyme is mentioned, the term also includes a functional domain of the enzyme. For example, a reverse transcriptase may refer to a reverse transcriptase protein or a reverse transcriptase domain.

[0074] A protein or nucleic acid derived from a species means that the protein or nucleic acid has a sequence identical to an endogenous protein or nucleic acid or a portion thereof in the species. The protein or nucleic acid derived from the species may be directly obtained from an organism of the species (e.g., by isolation), or may be produced, e.g., by recombination production or chemical synthesis.

[0075] Various embodiments are described hereinafter. It should be noted that the specific embodiments are not intended as an exhaustive description or as a limitation to the broader aspects discussed herein. One aspect described in conjunction with a particular embodiment is not necessarily limited to that embodiment and can be practiced with any other embodiment(s). Reference throughout this specification to “one embodiment”, “an embodiment,” “an example embodiment,” means that a particular feature, structure or characteristic described in connection with the embodiment is included in at least one embodiment of the present invention. Thus, appearances of the phrases “in one embodiment,” “in an embodiment,” or “an example embodiment” in various places throughout this specification are not necessarily all referring to the same embodiment, but may. Furthermore, the particular features, structures or characteristics may be combined in any suitable manner, as would be apparent to a person skilled in the art from this disclosure, in one or more embodiments. Furthermore, while some embodiments described herein include some but not other features included in other embodiments, combinations of features of different embodiments are meant to be within the scope of the invention. For example, in the appended claims, any of the claimed embodiments can be used in any combination.

[0076] All publications, published patent documents, and patent applications cited herein are hereby incorporated by reference to the same extent as though each individual publication, published patent document, or patent application was specifically and individually indicated as being incorporated by reference.

### Overview

[0077] The present disclosure provides various types of bacterial defense systems and the methods of identifying thereof. In some aspects, the present disclosure includes a number of newly identified defense systems. In some embodiments, the systems may be engineered, e.g., to have a desired activity or function. The engineered systems may be used as tools (e.g., to manipulate expression and/or activity of target genes or proteins) in biotechnology and medical applications. In one example, the system comprises an ATPase and an adenosine deaminase. Such system may be engineered to function as a base editor for gene editing applications. In another example, the system comprises one or more reverse transcriptases. In another example, the system comprises a retron or one or more molecules encoded by the retron. In another example, the system comprises an NTPase of a STAND (signal transduction ATPases with numerous associated domains) superfamily.

[0078] In another aspect, the present disclosure includes methods of identifying novel defense systems. In general, the methods are based on the fact that defense systems are often clustered in bacterial genomes. In some embodiments, the methods comprise identifying genes of known defense systems in a plurality of genomes of a bacterial species, identifying homolog genes close (e.g., within 10 kb) of the known defense systems, and selecting candidate genes among these homologs. For example, candidate genes may be selected when at least 10% of homologs of the genes are within 5000 nucleotides or 5 genes from one or more defense systems.

### Defense Systems

[0079] In one aspect, the present disclosure provides defense systems in prokaryotes such as bacteria. The defense systems may include proteins and nucleic acids that play roles in the defense of virus and other foreign organisms' attack and invasion. The present disclosure also includes nucleic acids encoding the components of the defense systems and vectors comprising such nucleic acids. The functions and applications of the defense systems herein are not limited to defending bacteria from foreign organisms (e.g., virus). Rather the defense systems may be used in various applications, e.g., as research tools and reagents, therapeutic agents, and diagnostic agents. In some cases, a defense system may be engineered to have a desired function. Such engineered defense system may not have a function related to defending bacteria from foreign organisms.

[0080] The defense systems provided herein may be of various types. These defense systems may comprise one or more enzymes that can manipulate (e.g., cleave, eliminate, degrade, etc.) the proteins and nucleic acids from the foreign organisms. In some examples, a host cell with the defense system may be resistant to foreign organism attacks. The term “resistance” to, for example, foreign nucleic acid invasion, encompasses a decrease in activity (e.g. phage genomic replication, phage lysogeny, circularization of phage genome) in bacteria expressing a functional defense system in comparison to bacteria of the same species under the same developmental stage (e.g. culture state) which does not express a functional defense system. According to specific embodiments the decrease provided by such resistance to foreign organism invasion is at least 1.5-fold, at least 2-fold, at least 3-fold, at least 5-fold, at least 10-fold, or at least 20-fold as compared to same in the absence of the functional defense system.

[0081] In some embodiments, the defense systems have an anti-phage activity. The term “anti-phage activity” or “resistant to infection by at least one phage” may encompasses an activity providing increased resistance of a host cell to infection by at least one phage in comparison to the host cell of the same species under the same developmental stage (e.g. culture state) which does not express the functional defense system. In some embodiments, a host cell may comprise a microbial cell. In some embodiments, a host comprises a bacterium. Anti-phage activity or resistance of a host cell to infection by at least one phage may be determined by, for example but not limited to, bacterial viability, phage lysogeny, phage genomic replication or phage genomic degradation, or a combination thereof.

[0082] In some embodiments, the defense systems may provide a host cell with resistance to foreign nucleic acid invasion. In some embodiments, a defense system described herein, provides the host cell with resistance to a foreign nucleic acid invasion, wherein the foreign nucleic acid invasion comprises resistance to at least one phage infection, or resistance to plasmid transformation, or a combination of resistance to at least one phage infection and resistance to plasmid transformation. In some embodiments, it is the combination of defense systems that provides a host cell with resistance to a foreign nucleic acid invasion. One skilled in the art would appreciate that defense against a foreign nucleic acid invasion may encompass, defending against entry of a foreign nucleic acid into the host cell, as well as, defending against the actions of a foreign nucleic acid that has entered the host cell. In some embodiments, defense against a foreign nucleic acid invasion comprises defense from phage infection. In some embodiments, defense against a foreign nucleic acid invasion comprises defense from plasmid transformation. In some embodiments, defense against a foreign nucleic acid invasion comprises defense against entry of a conjugative element. In some embodiments, defense against a foreign nucleic acid invasion comprises defense against any combination of phage infection, plasmid transformation, and entry of a conjugative element.

[0083] In some embodiments, the components in the system may be heterologous, i.e., they do not naturally occur together in the same cell or an organism.

[0084] The components in a system herein may be derived from the same or different prokaryotes. In some cases, the components may be engineered to be optimized for expressing in eukaryotic (e.g., mammalian) cells.

### Gene Clusters

[0085] In some embodiments, the components of a defense system may be in a gene cluster in a prokaryotic cell. The terms “gene cluster”, “cassette of genes”, “cassette”, and “components of a system”, may in some embodiments herein be used interchangeably having all the same meanings and qualities. In some embodiments, each gene of a “cassette of genes” comprises a nucleic acid sequence encoding a polypeptide component of the defense system. In some embodiments, a “cassette of genes” comprises nucleic acid sequences encoding components of the defense system including open reading frames encoding defense system polypeptide components, regulatory sequences, and non-coding RNAs. A skilled artisan would appreciate that a “cassette of genes” may encompass an operon. In some embodiments, a cassette of genes comprises regulatory sequences. In some embodiments, a cassette of gene comprises non-coding RNAs.

### Host Cells

[0086] The defense systems may be from or originate from microorganisms such as bacteria or archaea. In some embodiments, the defense may be from or originate from bacteria. As used herein, when a defense system originates form a species, it may be the wild type defense system in the species, or a homolog of the wild type defense system in the species. The defense system that is a homolog of the wild type defense system in the species may comprise one or more variations (e.g., mutations, truncations, etc.) of the wild type defense system. The terms “ortholog” and “homolog” are well known in the art. By means of further guidance, a “homolog” of a protein as used herein is a protein of the same species which performs the same or a similar function as the protein it is a homolog of. Homologous proteins may but need not be structurally related, or are only partially structurally related. An “ortholog” of a protein as used herein is a protein of a different species which performs the same or a similar function as the protein it is an ortholog of. Orthologous proteins may but need not be structurally related, or are only partially structurally related. Homologs and orthologs may be identified by homology modelling (see, e.g., Greer, Science vol. 228 (1985) 1055, and Blundell et al. Eur J Biochem vol 172 (1988), 513) or “structural BLAST” (Dey F, Cliff Zhang Q, Petrey D, Honig B. Toward a “structural BLAST”: using structural relationships to infer function. Protein Sci. 2013 April; 22(4):359-66. doi: 10.1002/pro.2225.). See also Shmakov et al. (2015) for application in the field of CRISPR-Cas loci. Homologous proteins may but need not be structurally related, or are only partially structurally related.

[0087] In some example, the host cells are E coli. In some embodiments, the bacteria may be gram positive bacteria. The term “Gram-positive bacteria” as used herein refers to bacteria characterized by having as part of their cell wall structure peptidoglycan as well as polysaccharides and/or teichoic acids and are characterized by their blue-violet color reaction in the Gram-staining procedure. Representative Gram-positive bacteria include: Actinomyces spp., Bacillus anthracis, Bifidobacterium spp., Clostridium botulinum, Clostridium perfringens, Clostridium spp., Clostridium tetani, Corynebacterium diphtherias, Corynebacterium jeikeium, Enterococcus faecalis, Enterococcus faecium, Erysipelothrix rhusiopathiae, Eubacterium spp., Gardnerella vaginalis, Gemella morbillorum, Leuconostoc spp., Mycobacterium abcessus, Mycobacterium avium complex, Mycobacterium chelonae, Mycobacterium fortuitum, Mycobacterium haemophilium, Mycobacterium kansasii, Mycobacterium leprae, Mycobacterium marinum, Mycobacterium scrofulaceum, Mycobacterium smegmatis, Mycobacterium terrae, Mycobacterium tuberculosis, Mycobacterium ulcerans, Nocardia spp., Peptococcus niger, Peptostreptococcus spp., Proprionibacterium spp., Staphylococcus aureus, Staphylococcus auricularis, Staphylococcus capitis, Staphylococcus cohnii, Staphylococcus epidermidis, Staphylococcus haemolyticus, Staphylococcus hominis, Staphylococcus lugdanensis, Staphylococcus saccharolyticus, Staphylococcus saprophyticus, Staphylococcus schleiferi, Staphylococcus similans, Staphylococcus warneri, Staphylococcus xylosus, Streptococcus agalactiae (group B streptococcus), Streptococcus anginosus, Streptococcus bovis, Streptococcus canis, Streptococcus equi, Streptococcus milleri, Streptococcus mitior, Streptococcus mutans, Streptococcus pneumoniae, Streptococcus pyogenes (group A streptococcus), Streptococcus salivarius, and Streptococcus sanguis.

[0088] In some embodiments, the term “Gram-negative bacteria” as used herein refer to bacteria characterized by the presence of a double membrane surrounding each bacterial cell. Representative Gram-negative bacteria include Acinetobacter calcoaceticus, Actinobacillus actinomycetemcomitans, Aeromonas hydrophila, Alcaligenes xylosoxidans, Bacteroides, Bacteroides fragilis, Bartonella bacilliformis, Bordetella spp., Borrelia burgdorferi, Branhamella catarrhalis, Brucella spp., Campylobacter spp., Chalmydia pneumoniae, Chlamydia psittaci, Chlamydia trachomatis, to Chromobacterium violaceum, Citrobacter spp., Eikenella corrodens, Enterobacter aerogenes, Escherichia coli, Flavobacterium meningosepticum, Fusobacterium spp., Haemophilus influenzae, Haemophilus spp., Helicobacter pylori, Klebsiella spp., Legionella spp., Leptospira spp., Moraxella catarrhalis, Morganella morganii, Mycoplasma pneumoniae, Neisseria gonorrhoeae, Neisseria meningitidis, Pasteurella multocida, Plesiomonas shigelloides, Prevotella spp., Proteus spp., Providencia rettgeri, Pseudomonas aeruginosa, Pseudomonas spp., Rickettsia prowazekii, Rickettsia rickettsii, Rochalimaea spp., Salmonella spp., Salmonella typhi, Serratia marcescens, Shigella spp., Treponema carateum, Treponema pallidum, Treponema pallidum endemicum, Treponema pertenue, Veillonella spp., Vibrio cholerae, Vibrio vulnificus, Yersinia enterocolitica, and Yersinia pestis.

### Examples of Systems

[0089] A system provided herein may include one or more enzymes or functional protein domains, and/or polynucleotides encoding thereof. The systems may comprise one or more wild type proteins and/or polynucleotides. In certain cases, the systems may be engineered systems, e.g., comprising one or more mutations or variants compared to corresponding wild type counterparts.

[0090] In some embodiments, the systems herein may be configured to modify a nucleic acid, e.g., DNA, RNA, or a hybrid or duplex of RNA and DNA. In one example, the systems may be configured to modify RNA.

[0091] The systems and components thereof may be or share sequence homology (e.g., sequence identity) with the example systems and components herein. In some embodiments, the systems or components thereof may share at least 50%, at least 60%, at least 70%, at least 80%, at least 90%, at least 95%, at least 99%, or 100% sequence homology (e.g., sequence identity) with the example systems or components herein.

### Systems Comprising ATPase and Adenosine Deaminase

[0092] In some examples, the systems comprise an ATPase and an adenosine deaminase. The ATPase may be a KAP-family ATPase. In some cases, the ATPase may comprise 1500 or less, e.g., 1400 or less, 1300 or less, 1200 or less, 1100 or less, 1000 or less, 950 or less, 900 or less, 850 or less, 800 or less, 750 or less, 700 or less, 650 or less, 600 or less, 500 or less, 400 or less, 300 or less, 200 or less, 100 or less amino acid residues. In one example, the ATPase may comprise 1000 or less amino acid residues. In certain examples, the ATPase may comprise 900 or less amino acid residues. In some cases, the adenosine deaminase may comprise 1500 or less, e.g., 1400 or less, 1300 or less, 1200 or less, 1100 or less, 1000 or less, 950 or less, 900 or less, 850 or less, 800 or less, 750 or less, 700 or less, 650 or less, 600 or less, 500 or less, 400 or less, 300 or less, 200 or less, 100 or less amino acid residues. In one example, the adenosine deaminase may comprise 1000 or less amino acid residues. In certain examples, the adenosine deaminase may comprise 900 or less amino acid residues.

[0093] In some examples, the system comprises an ATPase that is or share at least 50%, at least 60%, at least 70%, at least 80%, at least 90%, at least 95%, at least 99%, or 100% sequence homology (e.g., sequence identity) with the sequence of WP_012906049.1 and a adenosine deaminase that is or share at least 50%, at least 60%, at least 70%, at least 80%, at least 90%, at least 95%, at least 99%, or 100% sequence homology (e.g., sequence identity) with the sequence of WP_012906048.1. In some examples, the system comprises an ATPase that is or share at least 50%, at least 60%, at least 70%, at least 80%, at least 90%, at least 95%, at least 99%, or 100% sequence homology (e.g., sequence identity) with the sequence of WP_155731552.1 and a adenosine deaminase that is or share at least 50%, at least 60%, at least 70%, at least 80%, at least 90%, at least 95%, at least 99%, or 100% sequence homology (e.g., sequence identity) with the sequence of WP_064360593.1.

[0094] In some embodiments, the system comprising ATPase and an adenosine deaminase may further comprise one or more proteins or polypeptide domains. In some examples, the system may further comprise a membrane protein or domain. In certain examples, the system further comprises a SMODS and LOG-Smf/DprA-Associating Two TM (SLATT) domain. In certain examples, the system further comprises a CRISPR ancillary protein. The type VI-B CRISPR ancillary protein, e.g., Csx27.

[0095] In some embodiments, the systems may be engineered to function as a base editor in gene editing applications. For example, the systems may modify a nucleic acid. The modification may cause an A to G mutation in a nucleic acid. In some cases, the systems may modify RNA. In some cases, the systems may modify DNA.

[0096] In some embodiments, the adenosine deaminase may be those described in International Patent Publication Nos. WO2019071048, WO2019084063, WO2019126716, WO2019126709, WO2019126762, and WO2019126774; Cox DBT, et al., RNA editing with CRISPR-Cas13, Science. 2017 Nov. 24; 358(6366):1019-1027; Abudayyeh 00, et al., A cytosine deaminase for programmable single-base RNA editing, Science 26 Jul. 2019: Vol. 365, Issue 6451, pp. 382-386; Gaudelli N M et al., Programmable base editing of A⋅T to G⋅C in genomic DNA without DNA cleavage, Nature volume 551, pages 464-471 (23 Nov. 2017); Komor A C, et al., Programmable editing of a target base in genomic DNA without double-stranded DNA cleavage. Nature. 2016 May 19; 533(7603):420-4, or any variants, homologs, or orthologs thereof.

[0097] In some embodiments, the system further comprise one or more phage proteins. Examples of phage proteins include those in Tables 18A-18B.

### Systems Comprising Reverse Transcriptase(s)

[0098] In some examples, the systems herein comprise one or more reverse transcriptases. A reverse transcriptase refers to an enzyme capable of synthesizing DNA strand (e.g., complementary DNA or cDNA) using RNA as a template. In some embodiments, the reverse transcriptase is error prone. For example, the reverse transcriptase may have low proof-reading ability. For example, the reverse transcriptase may introduce one or more errors (i.e., nucleotides that are not complementary to the corresponding nucleotides on the template). Examples of reverse transcriptases include the transcriptases from Vibrio harveyi ML phage, Bifidobacterium longum, Bacteroides thetaiotaonicron, Treponema denticola, cyanobacteria, such as Trichodesmium erythrism, the genus Nostoc, or Nostoc punctiforme.

[0099] As used herein, the reverse transcriptase may be full-length reverse transcriptase or a functional fragment thereof. A functional fragment of a full-length reverse transcriptase may be a polypeptide that is shorter than the full-length reverse transcriptase but has reverse transcriptase activity. For example, a functional fragment of a full-length reverse transcriptase may have at least about 50%, at least about 60%, at least about 70, % at least about 80%, at least about 90%, at least about 95%, at least about 99%, or at least about 100% of the activity of the corresponding reverse transcriptase. The reverse transcriptase activity may be measured as amount of cDNA generated with certain amount of RNA template.

[0100] For example, the systems may comprise a first reverse transcriptase and a second reverse transcriptase. The first and the second reverse transcriptases may be comprised in the same protein. The first and the second reverse transcriptase may be the same. In certain cases, the first and the second reverse transcriptase may be the different. The reverse transcriptase may be error prone.

[0101] Examples of reverse transcriptases include UG1, UG2, UG3, UG8, UG15, or UG16 reverse transcriptases. In some examples, the system comprises an UG1 reverse transcriptase that is or share at least 50%, at least 60%, at least 70%, at least 80%, at least 90%, at least 95%, at least 99%, or 100% sequence homology (e.g., sequence identity) with the sequence of WP_115196278.1. In some examples, the system comprises an U2 reverse transcriptase that is or share at least 50%, at least 60%, at least 70%, at least 80%, at least 90%, at least 95%, at least 99%, or 100% sequence homology (e.g., sequence identity) with the sequence of WP_012737279.1. In some examples, the system comprises an UG3 reverse transcriptase that is or share at least 50%, at least 60%, at least 70%, at least 80%, at least 90%, at least 95%, at least 99%, or 100% sequence homology (e.g., sequence identity) with the sequence of 087902017.1 and an U8 reverse transcriptase that is or share at least 50%, at least 60%, at least 70%, at least 80%, at least 90%, at least 95%, at least 99%, or 100% sequence homology (e.g., sequence identity) with the sequence of WP_062891751.1. In some examples, the system comprises an UG15 reverse transcriptase that is or share at least 50%, at least 60%, at least 70%, at least 80%, at least 90%, at least 95%, at least 99%, or 100% sequence homology (e.g., sequence identity) with the sequence of GCK53192.1. In some examples, the system comprises an UG16 reverse transcriptase that is or share at least 50%, at least 60%, at least 70%, at least 80%, at least 90%, at least 95%, at least 99%, or 100% sequence homology (e.g., sequence identity) with the sequence of WP_001524904.1.

[0102] In some examples, the systems comprising one or more reverse transcriptases may further comprise one or more proteins or polypeptide domains. In some examples, the systems further comprise a Cas protein, e.g., Cas1. In some examples, the systems further comprise Abi. In some examples, the systems further comprise a nitrilase-family C—N hydrolase. In some examples, the systems further comprise a DNA polymerase. The DNA polymerase may be a family A DNA polymerase. In some examples, the systems further comprise a nitrilase. In some examples, the systems comprise a protein comprising one or more reverse transcriptases and a nitrilase domain. The nitrilase domain may be at the C-terminus of the protein. In some examples, the systems further comprise a topoisomerase-primase (TOPRIM), and a nitrilase. In some examples, the systems further comprise a Tol/interleukin 1 receptor (TIR). In some examples, the systems further comprise a protease. The systems may further comprise a serine protease domain linked to or associated with the reverse transcriptase. In some examples, the systems further comprise an integrase. In some examples, the systems further comprise a transposase. In some examples, the systems further comprise an MBL domain.

[0103] In some cases, the system may comprise a polynucleotide encoding the reverse transcriptase. In certain examples, the polynucleotide comprising the variable region and/or the template region may comprise a coding sequence for the reverse transcriptase. In some examples, the polynucleotide encoding the reverse transcriptase may be different from the polynucleotide comprising the variable region and/or the template region.

[0104] In some embodiments, the reverse transcriptase comprises an active site, e.g., (Y/F)×DD (SEQ ID NOs: 1-2), where X is any amino acid.

### Systems Comprising Retrons or Molecules Encoded by Retrons

[0105] In some examples, the systems herein comprise one or more retrons or molecules encoded by retrons. As used herein, a retron refers to a genetic element (e.g., a DNA molecule) which encodes components enabling the synthesis of branched RNA-linked single stranded DNA (msDNA) and a reverse transcriptase. Molecules encoded by retrons includes retron msr RNA that is the non-coding RNA produced by retron elements and is the immediate precursor to the synthesis of msDNA. Molecules encoded by retrons also include the reverse transcriptase and the corresponding RNA (e.g., mRNA).

[0106] In some examples, the retron is Ec67 retron. In some examples, the retron is Ec86 retron. In some examples, the retron is Ec78 retron. In some examples, the retron is TIR domain-associated retron. The TIR domain may have NAD+ hydrolase activity. In some examples, the retron is TOPRIM domain-associated retron. The TOPRIM domain may have nuclease activity.

### Systems Comprising STAND NTPase

[0107] In some examples, the systems herein comprise one or more NTPases of a STAND (signal transduction ATPases with numerous associated domains) superfamily. In some examples, the systems comprising the NTPase may further comprise one or more proteins or polypeptide domains, such as DUF4297, Mrr-like nuclease, SIR2, a trypsin-like serine protease, and/or a helical domain.

### Additional Examples of Systems

[0108] In some examples, the system may comprise a von Willebrand factor (VWF), a PP2C-like serine/threonine protein phosphatase, and a serine/threonine kinase. In some examples, the system may comprise SIR2 or a function domain thereof.

[0109] In some examples, the system may comprise a reverse transcriptase and a nitrilase. In some examples, the system may comprise a reverse transcriptase and a nitrilase, and a topoisomerase-primase (TOPRIM). In some examples, the system may comprise a reverse transcriptase and TIR. In some examples, the system may comprise an Ec67 retron. In some examples, the system may comprise Ec86 retron. In some examples, the system may comprise a reverse transcriptase. In some examples, the system may comprise two reverse transcriptases. In some examples, the system may comprise adenosine deaminase. In some examples, the system may comprise KAP ATPase. In some examples, the system may comprise KAP TatD. In some examples, the system may comprise a transmembrane ATPase. In some examples, the system may comprise an ATPase, QueC synthase, and TatD endonuclease. In some examples, the system may comprise S8 peptidase. In some examples, the system may comprise a DFU4011 domain. In some examples, the system may comprise a DFU4011 domain, a helicase, and a Vsr endonuclease. In some examples, the system may comprise a DUF3684 Hsp90-like ATPase and a helicase. In some examples, the system may comprise Trypsin-AAA35. In some examples, the system may comprise DUF4297-AAA3 and another protein. In some examples, the system may comprise DUF4297-AAA35. In some examples, the system may comprise AAA35. In some examples, the system may comprise RE-AAA35. In some examples, the system may comprise VWA and phosphatase and a kinase. In some examples, the system may comprise SIR2-DUF4020. In some examples, the system may comprise SIR2-STAND-TPR. In some examples, the system may comprise Polymerase and Histidinol Phosphatase (PHP)-ATPase. In some examples, the system may comprise PHP-SMC. In some examples, the system may comprise SIR2 and HerA. In some examples, the system may comprise DUF4297 and HerA. In some examples, the system may comprise Unknown-DUF1887. In some examples, the system may comprise DUF262 and DUF262-HNH. In some examples, the system may comprise DUF499, DUF3780, DUF1156 methyltransferase, and helicase. In some examples, the system may comprise Type I-E CRISPR-associated protein. In some examples, the system may comprise RT-protease. In some examples, the system may comprise ApeA.

[0110] Details of these systems are shown in Tables 1, 2, 5, 6, 9, 10, 12, 13, 15A, and 16A. Sequences of example systems are shown in Tables 6, 12, 15A, 15B, 15C, 16A, and 16B.

TABLE 1

| | # genes in | | | | |
|---|---|---|---|---|---|
| Construct | operon | Short Description | Donor Strain | Diagram File Name | Note |
| pLG018 | 1 | RT-nitrilase | Klebsiella pneumoniae | pLG018_RT-nitrilase | UG1/UG6 in Zimmerly & |
| | | | NCTC9143 | | Wang (2015) |
| pLG022 | 1 | TOPRIM-RT-nitrilase | Vogesella indigofera | pLG022_TOPRIM- | UG10 in Zimmerly & Wang |
| | | | DSM3303 | RT-nitrilase | (2015) |
| pLG024 | 1 | RT-TIR | Shigella dysenteriae | — | Novel retron |
| | | | NCTC2966 | | |
| pLG026 | 1 | Ec67 retron | Escherichia coli | pLG026_RT-TOPRIM | Ec67 retron (reported in |
| | | | NCTC8623 | (retron | Lampson et al. Science 1989; |
| | | | | | function unknown until |
| | | | | | present study) |
| pLG199 | 1 | Ec86 retron | Escherichia coli BL21 | — | Ec86 retron (reported in Lim |
| | | | | | et al. Cell 1989; function |
| | | | | | unknown until present study) |
| pLG028 | 1 | RT | Escherichia coli | pLG028_RT | |
| | | | 21-C8-A | | |
| pLG125 | 2 | RT-x2 | Escherichia coli | — | Two RTs acting in concert; |
| | | | ECOR12 | | UG3/UG8 in Zimmerly & |
| | | | | | Wang (2015) |
| pLG032 | 2 | Adenosine deaminase | Citrobacter rodentium | pLG032_Deaminase | ATPase + highly divergent |
| | | | DBS100 | | adenosine deaminase |
| pLG034 | 1 | KAP ATPase | Escherichia coli | pLG034_KAP- | Large transmembrane |
| | | | ECOR25 | transmembrane | ATPase; described |
| | | | | | computationally in Aravind et |
| | | | | | al. Genome Biol (2004) |
| pLG037 | 4 | KAP_TatD | Escherichia coli | pLG037_KAP | Described computationally in |
| | | | NCTC9009 | | Aravind et al. Genome Biol |
| | | | | | (2004) |
| pLG039 | 2 | S8 peptidase | Escherichia coli | pLG039_Protease | Proteasome-like ATPase + |
| | | | ECOR52 | | serine protease |
| pLG041 | 1 | DUF4011 | Escherichia coli | pLG041_DUF4011 | |
| | | | ATCC43886 | | |
| pLG044 | 2 | DUF3684 Hsp90-like | Vibrio harveyi | pLG044_Hsp90 | Large gene (~2500aa) with |
| | | ATPase + helicase | ATCC43516 | | large stretches of unknown |
| | | | | | regions; associated with a |
| | | | | | helicase |
| pLG046 | 3 | Trypsin-AAA35 | Erwinia | pLG046_Protease- | STAND ATPase (these are |
| | | | piriflorinigrans | STAND | not typically thought to be |
| | | | CFBP5888 | | defensive) |
| pLG049 | 2 | DUF4297-AAA3 + | Salmonella enterica | pLG049_DUF4297- | STAND ATPase |
| | | unknown | NCTC13175 | STAND | |
| pLG050 | 1 | DUF4297-AAA35 | Salmonella enterica | pLG050_DUF4297- | STAND ATPase |
| | | | NCTC10718 | STAND | |
| pLG051 | 1 | AAA35 | Escherichia coli | pLG051_STAND | STAND ATPase |
| | | | NCTC9087 | | |
| pLG053 | 1 | RE-AAA35 | Escherichia coli | pLG053_STAND | STAND ATpase |
| | | | NCTC11132 | | |
| pLG056 | 3 | VWA + phosphatase + | Escherichia coli | pLG056_VWA_ | |
| | | kinase | NCTC9094 | phophatase_kinase | |
| pLG061 | 1 | SIR2-DUF4020 | Escherichia coli | pLG061_SIR2- | |
| | | | NCTC9112 | DUF4020 | |
| pLG062 | 1 | SIR2 | Cronobacter sakazakii | pLG062_SIR2 | |
| | | | NCTC8155 | | |
| pLG063 | 1 | SIR2-STAND-TPR | Escherichia coli | pLG063_SIR2- | STAND ATpase |
| | | | NCTC13384 | STAND | |
| pLG066 | 1 | PHP-SMC | Escherichia coli | pLG066_ | |
| | | | NCTC8620 | Phosphoesterase | |
| | | | | (PHP)-SMC | |
| pLG070 | 2 | SIR2 + HerA | Escherichia coli | pLG070_HerA | Modular system (HerA pump |
| | | | NCTC11129 | | can be paired with SIR2, |
| | | | | | DUF4297, etc.) |
| pLG071 | 2 | DUF4297 + HerA | Escherichia coli | pLG070_HerA | Modular system (HerA pump |
| | | | NCTC11131 | | can be paired with SIR2, |
| | | | | | DUF4297, etc.) |
| pLG080 | 1 | Unknown-DUF1887 | Salmonella enterica | pLG080_DUF1887 | ~1200aa gene; first ~1000aa |
| | | | NCTC6026 | | are unknown |
| pLG157 | 2 | DUF262 + | Escherichia coli | — | Described computationally |
| | | DUF262-HNH | ATCC43886 | | in Makarova et al. 2011 |
| pLG078 | 4 | DUF499 + DUF3780 + | Escherichia coli | — | Restriction-modification-like |
| | | DUF1156 | ECOR58 | | system described |
| | | methyltransferase + | | | computationally in |
| | | helicase | | | Anantharaman et al. 2013 |

TABLE 2

| | # genes in | | Donor | Diagram | |
|---|---|---|---|---|---|
| Construct | operon | Short Description | Strain | File Name | Note |
| — | 6 | Type I-E CRISPR- | — | CRISPR_ATPase | Described computationally in Shmakov |
| | | associated | | | et al. PNAS 2017; predicted to be non- |
| | | | | | defense |
| — | 1 | RT-protease | — | RT-protease | Retron; described computationally in |
| | | | | | Zimmerly & Wang (2015) |

[0111] FIGS. 1A-1Y, 2, and 3 show diagrams of domain structures of exemplary defense systems.

### Additional Exemplary Systems

[0112] Additional examples of systems are shown in Tables 3A-3B below.

TABLE 3A

| Row | | | | # | | | | | |
|---|---|---|---|---|---|---|---|---|---|
| No. | Vector | System | System details | genes | Organism | Strain | bp | Note | Source |
| 1 | pLG003 | Control | BREX type I | 6 | E. coli | NCTC9078 | 13703 | Goldfarb et al. | |
| | | | | | | (DSM5212) | | 2014 | |
| 2 | pLG004 | Control | Druantia type I | 5 | E. coli | NCTC9078 | 11823 | Doron et al. | |
| | | | | | | (DSM5212) | | Science 2018 | |
| 3 | pLG005 | Control | Type I RM | 3 | E. coli | NCTC13846 | 6946 | | bloodculture, |
| | | | | | | (DSM105182) | | | human |
| | | | | | | | | | bacteraemia, |
| | | | | | | | | | UK |
| 4 | pLG006 | Control | Zorya type II | 3 | E. coli | ATCC8739 | 3917 | Doron et al. | Feces |
| | | | | | | | | Science 2018 | |
| 5 | pLG007 | Control | RT-AbiA | 1 | E. coli | ECOR30 | 1921 | Odegrip et al. | Bison, Alberta, |
| | | | | | | (ATCC35349) | | 2006 | Canada |
| 6 | pLG008 | Control | RT-AbiK | 1 | Lactococcus | W-1 | 2102 | Wang et al. | |
| | | | | | lactis | | | NAR 2011 | |
| 7 | pLG009 | RT | RT-protease | 1 | Stenotrophomonas | TG_2005 | | | |
| | | | | | maltophilia | | | | |
| 8 | pLG010 | RT | RT-protease | 1 | Haematobacter | KC2145 | | | |
| | | | | | massiliensis | | | | |
| 9 | pLG011 | RT | RT-protease | 1 | Sphingobium | ATCC51230 | 2029 | | clinical |
| | | | | | yanoikuyae | (DSM7462) | | | specimen |
| 10 | pLG012 | RT | RT-protease | 1 | Proteus mirabilis | 127_PMIR | 2009 | | |
| 11 | pLG013 | RT | RT-protease | 1 | Pseudomonas | PA-W9 | | | |
| | | | | | aeruginosa | | | | |
| 12 | pLG014 | RT | RT-protease | 1 | Photobacterium | NCTC11646 | 2657 | | human, leg |
| | | | | | damselae | | | | wound |
| 13 | pLG015 | RT | RT-protease | 1 | Paraburkholderia | PSCR-88 | | | |
| | | | | | silvatlantica | | | | |
| 14 | pLG016 | RT | RT-protease | 1 | Bacillus subtilis | ATCC13952 | 2203 | | |
| 15 | pLG017 | RT | RT-kinase- | 1 | E. coli | N1 | 4154 | | |
| | | | nitrilase | | | | | | |
| 16 | pLG018 | RT | RT-kinase- | 1 | Klebsiella | NCTC9143 | 5272 | SLATT | Urine |
| | | | nitrilase | | pneumoniae | | | associated | |
| 17 | pLG019 | RT | RT-nitrilase | 1 | E. coli | NCTC4169 | 3679 | | human, excreta |
| 18 | pLG020 | RT | RT-nitrilase | 1 | Klebsiella | KPNIH39 | 3479 | | uterine |
| | | | | | pneumoniae | | | | secretion |
| 19 | pLG021 | RT | TOPRIM-RT- | 1 | Pseudomonas | DSM16299 | 8446 | | rhizosphere |
| | | | nitrilase | | rhizosphaerae | | | | of grasses |
| 20 | pLG108 | RT | TOPRIM-RT- | 1 | Vogesella | DSM3303 | | | Garden soil, |
| | | | nitrilase | | indigofera | | | | Pacific Grove |
| | | | | | | | | | California |
| 21 | pLG023 | RT | RT-TIR | 1 | E. coli | NCTC9024 | 2393 | | |
| 22 | pLG024 | RT | RT-TIR | 1 | Shigella | NCTC2966 | 2139 | | monkey with |
| | | | | | dysenteriae | | | | enteritis |
| 23 | pLG025 | RT | RT-TOPRIM | 1 | E. coli | NCTC13441 | 2569 | | |
| 24 | pLG026 | RT | RT-TOPRIM | 1 | E. coli | NCTC8623 | 2405 | | gastro- |
| | | | | | | | | | enteritis |
| 25 | pLG027 | RT | RT-345 | 1 | E. coli | STEC 66 | 1951 | | |
| 26 | pLG028 | RT | RT-345 | 1 | E. coli | 21-C8-A | 2141 | | |
| 27 | pLG029 | RT | RT-x2 | 2 | E. coli | NCTC9091 | 3648 | | |
| 28 | pLG030 | RT | RT-x2 | 3 | Acinetobacter | NCTC7412 | 4236 | SLATT | human, urine |
| | | | | | calcoaceticus | | | associated | |
| 29 | pLG031 | ADA | Adenosine | 2 | E. coli | NCTC11116 | 5533 | | |
| | | | deaminase | | | | | | |
| 30 | pLG032 | ADA | Adenosine | 2 | Citrobacter | ATCC51459 | 5526 | | Laboratory |
| | | | deaminase | | rodentium | | | | mouse |
| 31 | pLG033 | ADA | Adenosine | 3 | Pluralibacter | ATCC33028 | 6689 | SLATT | Urine, France |
| | | | deaminase | | gergoviae | | | associated | |
| 32 | pLG034 | KAP | Transmembrane | 1 | E. coli | ECOR25 | 4415 | | Dog, New York |
| | | | KAP ATPase | | | (ATCC35344) | | | |
| 33 | pLG035 | KAP | Transmembrane | 1 | E. coli | NCTC8620 | 4037 | | human, diarrhoea |
| | | | KAP ATPase | | | | | | |
| 34 | pLG036 | KAP | KAP + | 4 | E. coli | ECOR10 | 4891 | | Adult human, |
| | | | unknown + | | | (ATCC35329) | | | New York |
| | | | QueC + TatD | | | | | | |
| 35 | pLG037 | KAP | KAP + | 4 | E. coli | NCTC9009 | 5408 | | |
| | | | unknown + | | | | | | |
| | | | QueC + TatD | | | | | | |
| 36 | pLG038 | Protease | ATPase + | 2 | E. coli | ECOR12 | 3678 | | Adult human, |
| | | | serine protease | | | (ATCC35331) | | | Sweden |
| 37 | pLG039 | Protease | ATPase + | 2 | E. coli | ECOR52 | 3676 | | Orangutan, |
| | | | serine protease | | | (ATCC35371) | | | Seattle Zoo, |
| | | | | | | | | | Washington |
| 38 | pLG040 | Protease | ATPase + | 2 | E. coli | NCTC9008 | 3917 | | pathogenic |
| | | | serine protease | | | | | | to chicks |
| 39 | pLG041 | DUF4011 | DUF4011- | 1 | E. coli | ATCC43886 | 5958 | | Feces, human |
| | | | helicase-Vsr- | | | | | | |
| | | | DUF3320 | | | | | | |
| 40 | pLG042 | DUF4011 | DUF4011- | 1 | Citrobacter | NCTC9067 | 6502 | | |
| | | | helicase-Vsr- | | braakii | | | | |
| | | | DUF3320 | | | | | | |
| 41 | pLG043 | DUF3684 | Hsp90-like | 2 | Pectobacterium | CFBP3304 | 10581 | | Japanese |
| | | | ATPase + | | wasabiae | (ATCC43316) | | | horseradish, |
| | | | SNF2 | | | | | | Eutrema wasabi, |
| | | | | | | | | | Japan |
| 42 | pLG044 | DUF3684 | Hsp90-like | 2 | Vibrio harveyi | ATCC43516 | 10687 | | Mouth of |
| | | | ATPase + | | | | | | shark, Bahamas |
| | | | SNF2 | | | | | | |
| 43 | pLG045 | DUF3684 | Hsp90- | 1 | Raoultella | NCTC9528 | 5918 | | butter |
| | | | DUF3684- | | planticola | | | | |
| | | | DUF3883- | | | | | | |
| | | | PDDEXK(CTD) | | | | | | |
| 44 | pLG046 | AAA35 | Protease- | 3 | Erwinia | CFBP 5888 | 7847 | | necrotic |
| | | | AAA35 | | piriflorinigrans | (DSM26166) | | | pear blossoms, |
| | | | | | | | | | Valencia, Spain |
| 45 | pLG047 | AAA35 | Protease- | 3 | Pectobacterium | M022 | 7740 | | |
| | | | AAA35 | | fontis | (LMG30744) | | | |
| 46 | pLG048 | AAA35 | DUF4297- | 1 | E. coli | NCTC9036 | 6514 | | |
| | | | AAA35-TPR | | | | | | |
| 47 | pLG049 | AAA35 | DUF4297- | 2 | Salmonella | NCTC13175 | 7175 | | |
| | | | AAA35 | | enterica | | | | |
| 48 | pLG050 | AAA35 | DUF4297- | 1 | Salmonella | NCTC10718 | 6261 | | |
| | | | AAA35 | | enterica | | | | |
| 49 | pLG051 | AAA35 | Unknown- | 1 | E. coli | NCTC9087 | 5109 | | |
| | | | AAA35- | | | | | | |
| | | | unknown | | | | | | |
| 50 | pLG052 | AAA35 | Unknown- | 1 | E. coli | NCTC10650 | 4781 | | |
| | | | AAA35- | | | | | | |
| | | | unknown | | | | | | |
| 51 | pLG053 | AAA35 | RE-AAA35 | 1 | E. coli | NCTC11132 | 4964 | | |
| 52 | pLG054 | Kinase | DUF2357 | 7 | Obesumbacterium | DSM2777 | 12191 | | ale yeast |
| | | | | | proteus | | | | |
| 53 | pLG055 | Kinase | Kinase- | 2 | E. coli | NCTC13919 | 6873 | | Clinical isolate. |
| | | | helicase_1600aa | | | | | | Human, rectum |
| 54 | pLG056 | Kinase | VWA + | 3 | E. coli | NCTC9094 | 3605 | | |
| | | | phosphatase + | | | | | | |
| | | | kinase | | | | | | |
| 55 | pLG057 | Kinase | 5-gene McrBC- | 5 | Plasticicumulans | DSM25287 | 11931 | | lactate-fed |
| | | | like | | lactativorans | | | | bioreactor |
| | | | | | | | | | inoculated with |
| | | | | | | | | | activated sludge |
| | | | | | | | | | from a sewage |
| | | | | | | | | | treatment plant, |
| | | | | | | | | | Kralingseveer, |
| | | | | | | | | | Rotterdam, |
| | | | | | | | | | Netherlands |
| 56 | pLG058 | GTPase | GTPase | 3 | Pantoea | LMG 2657 | 4789 | | cypripedium orchid, |
| | | | | | cypripedii | (DSM3873) | | | California |
| 57 | pLG059 | GTPase | GTPase | 3 | Pectobacterium | CFBP3304 | 5216 | | Japanese |
| | | | | | wasabiae | (ATCC43316) | | | horseradish, |
| | | | | | | | | | Eutrema wasabi, |
| | | | | | | | | | Japan |
| 58 | pLG060 | GTPase | GTPase | 3 | E. coli | NCTC10962 | 4577 | | faeces(arabian |
| | | | | | | | | | gulf) |
| 59 | pLG061 | SIR2 | SIR2-DUF4020 | 1 | E. coli | NCTC9112 | 4212 | | |
| 60 | pLG062 | SIR2 | SIR2-TPR- | 1 | Cronobacter | NCTC8155 | 4329 | | tin of dried |
| | | | HEAT | | sakazakii | | | | milk |
| 61 | pLG063 | SIR2 | SIR2-AAA35 | 1 | E. coli | NCTC13384 | 3411 | | |
| | | | | | | (ATCC11229) | | | |
| 62 | pLG064 | Misc | Dcm + | 5 | Pseudomonas | NCTC10727 | 11911 | | |
| | | | unknown + | | aeruginosa | | | | |
| | | | unknown + | | | | | | |
| | | | HerA + Vsr | | | | | | |
| 63 | pLG065 | Misc | Dcm + | 5 | Aquimonas voraii | DSM16957 | 11635 | | water, |
| | | | unknown + | | | | | | Assam, India |
| | | | unknown + | | | | | | |
| | | | HerA + Vsr | | | | | | |
| 64 | pLG066 | Misc | Phosphoesterase | 1 | E. coli | NCTC8620 | 3066 | | human, diarrhoea |
| | | | (PHP)-SMC | | | | | | |
| 65 | pLG067 | Misc | Helicase- | 2 | E. coli | NCTC9033 | 7356 | | |
| | | | nuclease_unknown | | | | | | |
| 66 | pLG068 | Misc | DUF3893 | 3 | Pseudomonas | DSM10604 | 6714 | | common lilac |
| | | | (possible pAgo) | | syringae | | | | |
| 67 | pLG069 | Misc | RecQ | 1 | Klebsiella | NCTC11696 | 5424 | | |
| | | | | | oxytoca | | | | |
| 68 | pLG070 | Misc | SIR2 + HerA | 2 | E. coli | NCTC11129 | 3308 | | |
| 69 | pLG071 | Misc | DUF4297 + | 2 | E. coli | NCTC11131 | 3419 | | |
| | | | HerA | | | | | | |
| 70 | pLG072 | Misc | Dcm + Hsp90- | 4 | E. coli | NCTC86 | 7655 | | |
| | | | sensor histidine | | | (DSM301) | | | |
| | | | kinase + | | | | | | |
| | | | response regulator | | | | | | |
| 71 | pLG073 | Misc | Dcm + Hsp90- | 4 | E. coli | NCTC11560 | 6042 | | |
| | | | sensor histidine | | | | | | |
| | | | kinase + | | | | | | |
| | | | response regulator | | | | | | |
| 72 | pLG074 | Misc | Palatin + | 4 | Klebsiella | NCTC9735 | 4755 | | |
| | | | nucleotidyltrans- | | aerogenes | | | | |
| | | | ferase + | | | | | | |
| | | | UBCc/ThiF + | | | | | | |
| | | | ubiquitin-like | | | | | | |
| 73 | pLG075 | Misc | Sensor histidine | 2 | Pseudomonas | NCTC13717 | 4088 | | |
| | | | kinase + | | aeruginosa | | | | |
| | | | phosphoribosyltrans- | | | | | | |
| | | | ferase | | | | | | |
| 74 | pLG076 | Misc | PH-TerB- | 2 | Klebsiella | NCTC11357 | 3637 | | |
| | | | DUF726 | | pneumoniae | | | | |
| | | | (transmembrane) + | | | | | | |
| | | | Nup (transmembrane) | | | | | | |
| 75 | pLG077 | Misc | TerB- | 3 | E. coli | NCTC9024 | 6037 | Identified in | |
| | | | DUF2791-Lhr | | | | | Doron et al. | |
| | | | | | | | | Science 2018 | |
| 76 | pLG078 | Misc | DUF499 + | 3 | E. coli | ECOR58 | 9809 | Identified in | Lion, |
| | | | DUF1156 | | | (ATCC35377) | | Anantharaman | Seattle Zoo, |
| | | | | | | | | et al. Biology | Washington |
| | | | | | | | | Direct 2013, | |
| | | | | | | | | 8: 15 | |
| 77 | pLG079 | Kinase | 5-gene McrBC- | 5 | Yoonia | DSM29955 | 11425 | | tidal flat |
| | | | like | | sediminilitoris | | | | sediment, |
| | | | | | | | | | South Korea |
| 78 | pLG080 | Misc | DUF1887 | 1 | Salmonella | NCTC6026 | 4100 | | |
| | | | CTD; no other | | enterica | | | | |
| | | | domains | | | | | | |

TABLE 3B
Sequences of loci of row numbers 1-78 of Table 3A.

| Row | | |
|---|---|---|
| No. | Vector | Locus |
| 1 | pLG003 | acagcaccacgttcatcttccttttttaactgattttacagagactttaatacagttaaaattttatttcctgagctgtaatcgat |
| | | taagttgatgcatttaatgggaatgatatagggtcatttccagtctcacttatagaaatggctaaagcatgactctcgccaaaacc |
| | | gtttatgtgttgtacataacgcgatcatccctctcacaaattgccttttctcatggcatctcgcccggtcccccattacaatcact |
| | | ttttgttttttgcgagctgcattccagtcttcagagggtttttcgatgattaaaaatgacaaggcatggataggagacttgctggg |
| | | cggaccgctcatgagcagggaaagccgcgtcattgccgaactgttgctaaccgatcccgatgaacagacatggcaagagcaaattg |
| | | ttggccacaacattttacaagcctcttctcctaacaccgcaaaacgttacgcggcaacaatcaggcttcgcctgaacacgctggat |
| | | aaaagcgcgtggacattgattgccgaaggtagtgaacgggaacgccaacaacttctgtttgtggctctgatgctacattcgccggt |
| | | agttaaggattttctggctgaagtggtgaacgatctgcgcaggcagttcaaggaaaagttgcctggcaatagctggaacgaatttg |
| | | tgaatagccaggttcgcctacatccggtactcgccagctactcagattcatctattgcaaaaatgggaaacaatctggtgaaggcg |
| | | cttgctgaagcgggttatgtggatacgccccgcagacgtaacctgcaggcagtttaccttttaccggaaactcaggcagtgttaca |
| | | gcgcctgggacaacaggacttgatatctattctggagggaaaacggtgatagatcccgttcttgaatatcgcctgtctcaaatcca |
| | | gagtcgcattaacgaagatcgcttcctcaaaaataacggctccggaaatgaaattggtttttggatctttgattatcccgcgcagt |
| | | gcgaactgcaggtacgggagcatttgaaatatctgctccggcatctggaaaaggaccataaatttgcctgtctgaatgtcttccaa |
| | | atcatcatcgatatgctcaatgaacgcggccttttcgagcgcgtctgccagcaggaagtcaaagtgggtactgagacgctgaaaaa |
| | | gcagcttgctggtccgttaaatcagaaaaagatcgctgattttatagcgaaaaaagtcgatctggctgcccaggattttgtcattc |
| | | ttaccggcatgggcaacgcctggccattagtacgcggtcatgaactgatgagtgccttgcaggatgtcatggggttcaccccactg |
| | | ctgatgttttatcctggcacctacagcgggtacaacctttccccgctcacagacaccggttcacaaaattattatcgcgctttcag |
| | | actggtaccagatacgggacccgcagcaacattgaatcctcaatgaagagcataacaatgaatattgaacagatttttgaaaaacc |
| | | tctaaaacgaaatataaacggggtagtcaaagcagagcaaaccgatgatgccagcgcgtacatcgagttagatgaatatgtcatca |
| | | cccgcgaactggaaaaccatcttcgccatttcttcgaatcctatgttcctgccactggcccggaacggatccgtatggaaaacaag |
| | | atcggcgtatgggtttcaggcttcttcggttcaggtaaatcgcactttattaagattctttcttatcttttatctaaccgcaaagt |
| | | tacacataacggtacggaacgtaatgcttactccttctttgaagataaaatcaaagatgcattattccttgccgatattaacaaag |
| | | cggtgcattacccgactgaagtcattctgttcaatattgattcgcgtgccaacgtagatgacaaagaagatgccattcttaaagtc |
| | | ttcctgaaagttttcaacgaacgcattggatactgcgctgattttccgcatattgcccatcttgagcgcgagctggataaacgcgg |
| | | tcagtatgaaacctttaaagccgcgtttgccgatatcaatggctcgcgctgggaagacgagcgcgacgcttactacttcatcagcg |
| | | atgacatggcacaagcattaagccaggccacgcagcagagtcttgaatcctcccgccaatgggtggaacaactcgacaaaaacttc |
| | | ccgctggatatcaataatttttgccagtgggtaaaagagtggctggatgacaatggtaagaacatcctctttatggtggatgaagt |
| | | cggtcagttcattggcaaaaatacgcaaatgatgctgaagctgcagactattactgaaaaccttggggtaatttgcggtggccgcg |
| | | catgggttatcgtgacttcgcaggccgatatcaacgcggcaatcggtggtatgagcagtcgcgacggacaggacttctccaagatc |
| | | caggggcgcttctctacacgcctgcaactttccagctctaacacatcagaagttatccagaaacgtttgttggtaaagactgacga |
| | | agcaaaagcggcactggcaaaagtgtggcaagagaaagccgatatcctgcgtaaccagctggcttttgacactacaacaactactg |
| | | cactacgtccttttaccagcgaagaagagttcgttgacaactacccgtttgtcccgtggcactatcagattctgcaaaaagtgttt |
| | | gaatctattcggacgaaaggtgcagcgggtaaacaattggccatgggtgagcgttctcagctggaggcattccagacggcggcgca |
| | | gcaaatctcagcgcaagggctggattctctggtgcctttctggcgcttctatgccgccattgagagcttcctggaacctgccgtta |
| | | gccgcaccatcactcaggcttgccagaatggcattcttgatgagttcgatggcaacctgcttaaaacgctgttcctgatccgctat |
| | | gtggaaacgctgaaaagcaccctggataacctggtcacattgtctatcgataggatcgatgccgataaagttgagttgcgccgccg |
| | | ggtcgaaaaaagtctcaacacgcttgaacgcctgatgctcattgcgcgcgttgaagataaatatgtgttcctgaccaacgaagaga |
| | | aagagatcgaaaacgagatccgtaacgttgatgtcgatttctctgcgatcaacaaaaaactggcatcgatcatctttgatgacatt |
| | | ctgaaaagccgtaaatatcgttatccggctaacaagcaagactttgatatcagccgcttcctgaacgggcatccattagacggcgc |
| | | agtgcttaacgatctggtggtgaagatcctgacccctaaagatccgacttattcgttctataacagcgatgcgacctgtcgccctt |
| | | atacgtcagaaggcgacggctgtattttgattcgtctgcccgaagagggccgtacctggagcgatattgatttagtcgtccagact |
| | | gaaaagttcctcaaagataacgccgggcaacgtccggaacaggcaaccctgctctcagaaaaagcgcgtgaaaacagcaaccggga |
| | | aaaattactccgtgttcagttggaatcactacttgcagaagcagacgtctgggcgattggcgaacgcttaccgaaaaaatcctcca |
| | | cgccatcgaacattgtcgatgaagcctgccgttacgtgattgaaaacaccttcggcaagctgaagatgctgcggccttttaacggt |
| | | gacatctcccgtgaaattcatgcattactgacggttgagaacgacaccgaactggatctcggtaacctcgaagagtccaaccccga |
| | | cgccatgcgcgaggtagaaacctggatcagcatgaatatcgaatacaataaacctgtgtatttacgcgatattctgaaccattttg |
| | | cgcgtcgcccttatggctggcccgaagacgaagtgaaactgctagtagcccgtctggcctgcaaaggtaaattcagcttcagccag |
| | | caaaacaacaacgtcgagcgaaaacaggcgtgggagttatttaataacagccgccgccatagcgaattgcgtctgcataaagttcg |
| | | ccgtcatgatgaagcgcaggtgcgtaaagccgcgcaaaccatggctgacatcgctcagcagccgtttaacgaacgggaagagccgg |
| | | cgctggttgaacatattcgtcaggtatttgaagagtggaagcaagagctgaacgtattccgcgccaaggcagagggcggaaacaat |
| | | ccggggaaaaacgagattgaatccggtctgcgcctgcttaatgccattcttaatgagaaagaagattttgccctgatcgaaaaagt |
| | | ctcatcgctgaaagatgaacttctggatttcagcgaagaccgtgaagatttggtcgacttctaccgtaagcaattcgccacctggc |
| | | aaaaactgggtgctgcgctgaatggcagctttaaatctaaccgcagcgcgctggaaaaagacgccgcagcggttaaagcgctgggc |
| | | gagctggaaagcatctggcaaatgccggaaccttataagcatctcaatcgcatcacgccgttgattgaacaggtccagaacgtcaa |
| | | ccatcagttagtcgaacagcatcgccagcacgccctcgaacgcattgacgcccgcattgaggaaagccgtcaacgcttgctggaag |
| | | cgcacgccacgtcggagctgcaaaacagcgttctgctgccgatgcaaaaagccagaaaacgcgctgaagtcagccagtcgattccg |
| | | gaaattttggcggaacagcaagagacaaaagcgctgcaaatggatgcagataaaaagattaacctgtggatcgacgagctgcgtaa |
| | | aaagcaagaagcacaactccgggcagcaaatgaagctaaacgcgctgccgactcagaacagacttatgttgtggtggaaaaaaccg |
| | | ttatccaaccggtaccgaaaaaaacgcatctggtgaatgtcgccagtgagatgcgtaatgccaccggtggtgaagttctggaaacg |
| | | accgaacaggtggaaaaggcgctcgacacgttacgcacaacgctgctggccgtcattaaagcaggcgatcgcattcgccttcagta |
| | | actcccatttcagggcagcactctgctgccctttgcaggattttctatgaataccaataacattaaaaaatatgccccacaggccc |
| | | gtaacgacttccgcgatgcggtgatccagaagctaacgacgcttgggatcgctgcagataaaaaaggcaatttgcagattgccgag |
| | | gccgaaaccattggcgagaccgtgcgttacggtcagtttgattacccgttatcgacccttccccgccgcgaacggctggtaaaacg |
| | | cgcccgtgagcagggttttgaggtgctggttgagcactgcgcctacacctggtttaaccgcttatgtgcaattcgctatatggagc |
| | | tacacggttatcttgagcacggcttccgtatgttgtcccacccggagacgccgaccgcgtttgaggtgctggatcatgtgccggaa |
| | | gtggcagaagccctgctgccggaaaataaggcgcagctggttgaaatgaagctttccggtaatcaggacgaagccctgtaccgcga |
| | | actgctgctggggcagtgccacgccctgcaccacgcgatgccgttcctgtttgaagcggtagatgacgaagcggaactgctgttgc |
| | | cggataacctgacccgtaccgactctattctgcgtgggctggttgatgatattccggaagaagactgggagcaggtagaggttatc |
| | | ggctggctgtatcagttctatatttcggaaaagaaagatgccgtgattggcaaagtggtgaagagcgaagatattcctgccgccac |
| | | ccagctgtttacgccaaactggattgtgcagtatctggtacaaaactccgttggccgccagtggttgcagacctacccggactcgc |
| | | cgctgaaagacaaaatggagtactacatcgagcctgcggaacaaacgccggaagtgcaggcgcagctggcggcgattaccccagcc |
| | | agcattgaacccgaaagtattaaagtgctcgacccagcctgcggctccggtcatattttgattgaagcctataatgtgctgaaaaa |
| | | tatctacgaagagcgtggttatcgcgggcgtgatattccacaactgattctggaaaataatatttttggtcttgatatcgacgacc |
| | | gcgcggcacagctttccggctttgcattattaatgatggcgcgtcaggatgaccgcagaatatttacccgcgatgtacgtctgaat |
| | | attgtctctttgcaggaaagcctgcatctggatatcgccaaactctggcagcaactgaatttccaccagcaggtacaaaccggcag |
| | | tatgggggatatgtttgctgaaaataacgcgttaacccaaactgacagcgcagaatatcagctgctgatgcgcacgctgaaacgct |
| | | ttgtgaatgcaaaaacgctgggctcactgattcaggtgccgcaggaagaagaagcggaactgaaggtattcctggacgcgttgtat |
| | | cgcctggaacaggaaggcgatttccagcagaagacggcggcaaaagcgtttattccgtttattcagcaggcgtggattttagcgca |
| | | gcgatatgatgcggtagtggcgaatccgccgtatatggggggtaattatatggagacagaacttaagaatttcgtctcttcttact |
| | | accctcaaggaaaggcggatctttattcttcatttatggtcagattacttttacaattaaaagataatcgcactttaagcctaatg |
| | | accccctttacttggatgaatttatcatcatttgaagagctccgaaaaattatacttacaaatttcagcattcagtcattagtaca |
| | | gcctgaatatcattcattttttgagtcagcttatgtcccaatttgtgcttttagcatttcaaataccccattaagctggaatgcaa |
| | | aattttttgatttatcagatttttatggagaaaaaaatcaagctccaaattttcagtatgcaattaaaaatgacaataaatgtcat |
| | | tggaaatataacagaatcaccacggactttctatgtactcccggatatatcattgcttactctctgcctgattctgcgttatcttg |
| | | cttcaaaacatccaaaaaacttcatgatgtttgcaatctaaaacaaggattaattactggtgataatgaaagatacctaagattct |
| | | ggcatgaaatcagctataactctttcagtctcaatgaaaaaagaaaaaaaacaaaatggttcccatatcaaaaaggtggtgcatac |
| | | cgtaaatggtatggtaataatgattatgttgttgactgggagaatgatggttattccattaaaaacttttataatgacaaaggtaa |
| | | attacgctcacgccctcaaaacatacaattttattgtaaagagggtttaacatggacaagtttaactatttcgtcactatcgatga |
| | | gatatgtaccaaatggatatatttttgatgcaaaaggacctatgtgttttccgaaatcctctttggatatctggaatattcttggc |
| | | tatgcgaatagcaaagtaatagatatatttctcaaacaattagcgcccaccatggattattctcaagggcctgttggaaatgtccc |
| | | attcaaatttaacgatggtgatttgaacgagataataaaagaactcgtaaacattcacaaacgtgactgggatgaaaatgaaacat |
| | | cttttgagtttaagagagatatgttggttcatttttcaagagatattaacactattaagggtagttttacactaaggcaaggggaa |
| | | aataaaaaagcgattaacagaacaaaatttttagaagaaatgaataactctttctttataaattgctttaatctaactgatatttt |
| | | atctccagaaattgaactaaacaaaatcacgttaacgcatgcaactattgaaattgatattcaaaaaataatttcatatgcaatag |
| | | gctgccaaatgggacgttactcccttgatcgcgaaggtctggtatacgctcatgaaggcaataatggcttcgccgatcttgtcgcc |
| | | gaaggtgcttataaaagcttcccggctgatagtgacggcattctgccgctaatggatgaagagtggtttgacgatgacgtcacctc |
| | | tcgcgtcaaggagtttatccgcaccgtttggggcgaagaatatttgcgcgaaaacctcgattttatagccgaagttctcaagccca |
| | | aaaaaggcgaatctgcgctggagaccattcgtcgctatctttccacccagttctggaaagatcatctgaaaatgtataaaaagcgt |
| | | ccaatctactggctattcagctccggtaaagagaaagcgtttgagtgcttggtgtatctgcatcgctataacgatgccacgctgtc |
| | | gagaatgcgtaccgaatatgtggtgccgctgctggcgcgttatcaggccaatattgatcgcctgaacgatcaacttgatgaggctt |
| | | ctggcggtgaatccacacgtctgaaacgcgaacgcgacagcctgatcaaaaaattcagcgaactgcgcagctatgacgatcgcctg |
| | | cgtcactatgctgatatgagaatcagtattgatctcgacgatggcgttaaggttaactacggcaagtttggcgatctgctggcaga |
| | | tgtcaaagccatcaccggcaatgccccagaggtgatctaaaccagacggcacgttctcctgttgccgggttctgcccggtggcaaa |
| | | taccaccgggaaacgcgccgctgctgacatttctccacctcacttcatgataaaatgcgccaccgtgtcaaaatctccttttcgcg |
| | | ttttggcgctttcttattcatcgtaacaacatgggattgtgaacttgcaaaatcaggactttattgctggccttaaagctaaattt |
| | | gccgaacatcgcatcgttttctggcacgatcccgataaacgttttattgaggaactggaacagctcaagcttgaaagcgtcacgct |
| | | aatcaacatgacccacgagtcacagctggcggtaaaaaaacgcatcgagattgatgagccagaacagcagttcctgctgtggttcc |
| | | cccatgatgcgccgcctcatgaacaagactggctgctggatatccgcctttacagcagcgaattccatgccgattttgccgccatc |
| | | accctgaacacgctgggcattccccagcttggcctgcgcgagcatattcagcgacgcaaggccttcttcagcactaaacgcacgca |
| | | ggcgctgaaaaatctggcgacagaacaggaagatgaagcctcgctggataagaaaatgattgcggtgatcgctggcgcaaagaccg |
| | | cgaaaaccgaagacattttgttcaacctgattacccagtacgttaaccaacaaatagaagacgacagcgaactggaaaacacgcag |
| | | gcgatgctgaaacgccacggtctggactcggtattgtgggaaatgctcaaccacgaaatgggctaccaggcagaggagccatcgct |
| | | ggaaaacctgctcctgaaactgwtgtaccgatctctctgcccaggccgacccacagcagcgcgcctggctggaaaaaaatgtcctg |
| | | ctgacgccatccggcagagcatctgccctggcatttatggtgacctggcgtgccgatcgtcgctataaagaggcttatgactactg |
| | | cgctcagcaaatgcaggccgccctgcacccggaagatcattaccgactcagctcgccgtatgatttgcacgaatgcgaaaccaccc |
| | | tcagcatcgaacaaaccattattcatgcgctggtaacacagctgctggaagagagcaccacgctcgatcgggaagcctttaaaaaa |
| | | ctgctctctgagcgccagagcaaatactggtgtcagacacaaccagagtattacgccatctatgacgcattgcgccaggctgagcg |
| | | gttgctgaacctgcgcaatcgccacatcgatggtttccactaccaggacagcgccaccttctggaaagcctactgcgaagaactgt |
| | | tccgcttcgaccaggcttatcgcctgtttaatgaatatgccttgctggttcacagcaaaggagcgatgatcctcaagagcctggat |
| | | gattatatcgaggcgctctacagcaactggtatctggcagagttaagccgtaactggaacgaagtgctggaagcggaaaatcgtat |
| | | gcaggcgtggcaaatccctggcgtgccgcgtcagcagaacttcttcaatgaggtggtgaagccacagttccaaaatccgcaaatca |
| | | aacgcgtgttcgtgataatttccgatgccctgcgttatgaagtggcggaggagctggggaatcaaatcaataccgagaaacgcttt |
| | | accgcagaactgcgctcgcagctcggcgtgctccccagctacacccaactgggaatggcggcattgctgccccatgaacaactttg |
| | | ctatcaacccggtaacggcgacatcgtttatgctgatgggctgtcgacctcgggtattcctaaccgcgataccattctgaagaact |
| | | ataagggaatggcgataaaatcgaaggaccttctggagttaaaaaatcaggaagggcgagaccttattcgcgattacgaagtggtg |
| | | tatatctggcataacacgattgatgccactggcgacacggcatccacggaagataaaaccttcgaagcgtgccgcacggcggtggc |
| | | tgaactgaaagatttagtcaccaaggtgatcaaccgcctccacggcacacgcatttttgttacggcggatcacggtttcctgttcc |
| | | agcaacaggcgctttcggttcaggataaaaccactctgcaaattaagccggaaaacaccatcaagaaccacaaacgctttattatc |
| | | ggccatcagcttcccgccgatgatttttgctggaaagggaaagtggcggataccgcaggcgtgagcgacaacagcgagttcctgat |
| | | tccgaaagggatccagcgcttccatttctctggcggcgcgcgcttcgttcatggcggcaccatgttgcaggaggtttgcgttccgg |
| | | tattgcagataaaagccctgcaaaaaaccgccgcagaaaaacagccacagcgccgcccggtggatattgtcgcttaccatccgatg |
| | | attaagctagtgaacaatatcgataaagtgagcctgttgcagacgcatccggtgggcgaactttatgaaccgcgtatcctgaacat |
| | | ttacattgtcgacaacgccaacaatgtggtctcgggcaaagagcgcatcagctttgacagtgataacaacaccatggaaaaacgcg |
| | | tacgcgaagttacgctgaagctgattggcgctaacttcaaccgtcgcaatgagtactggttgatactggaagacgcacaaacggaa |
| | | acggggtatcagaagtacccggtcattatcgatctggcgttccaggatgatttcttctaagtgaggcgatatgcaaacccatcatg |
| | | atttacctgtttcaggcgtatccgcaggggaaattgcctccgagggttacgatctggacgccctgctgaaccagcattttgctggt |
| | | cgcgtggtgcgtaaagatctcaccaagcaactcaaggaaggggcaaacgtcccggtgtatgtgcttgagtatctgctcggcatgta |
| | | ctgcgcctctgacgatgacgatgtggtcgagcaagggttgcaaaacgttaagcgtattctggctgataactatgtgcgcccggatg |
| | | aagcggagaaagtgaagtcgctgatccgcgagcgtggttcgtacaaaatcatcgataaagtgtcggtgaaactgaaccagaaaaaa |
| | | gacgtttacgaagcccagctttctaacctcggcatcaaagacgcgctggtgccctcgcagatggttaaagacaacgagaagctact |
| | | gacgggcggtatctggtgcatgattaccgtcaactatttctttgaagaagggcagaagacctcacccttctcattgatgacgctca |
| | | agcctatccagatgccgaatatggatatggaagaggtgttcgatgcgcgtaaacactttaaccgtgaccagtggatcgatgtgctg |
| | | ctgcgctcggtgggtatggagcccgccaatattgagcaacgcaccaaatggcaccttatcacccgtatgatcccgttcgtggagaa |
| | | caactataacgtttgcgagctggggccgcgtggcaccggtaaaagccatgtgtataaagagtgttctcctaactccctgttagttt |
| | | ccggcgggcaaacgaccgttgccaacttgttctacaacatggccagtcgccagatcggcctggttggcatgtgggatgtggtagcg |
| | | ttcgacgaagtcgcggggatcactttcaaagataaagacggcgtgcaaatcatgaaagattacatggcgtcaggatctttctctcg |
| | | cggcagagattcgattgaaggtaaagcgtcgatggttttcgtcggcaacatcaatcaaagcgtagagactctcgttaaaaccagcc |
| | | atttgctggcaccatttccgactgcgatgattgatacagcatttttcgaccgctttcatgcctatattcccggttgggaaatcccc |
| | | aaaatgcgcccggaattctttaccaaccgttacgggctgattacggattatctcgctgaatatatgcgcgaaatgcgcaaacgcag |
| | | tttctctgatgcgattgataaattctttaagctgggtaacaacctcaaccagcgtgacgttattgccgttcgacgtaccgtgtcgg |
| | | ggttgttaaaactcatgcatcccgatggcgcgtacagcaaagaagatgtgcgagtctgcctgacctatgcgatggaagttcgccgc |
| | | cgcgtgaaagagcaacttaaaaaactgggcggtctggagttcttcgatgtgaactttagctacatcgacaacgaaacgctggaaga |
| | | gttttttgtgagcgtaccggaacagggcggcagcgaacttattcctgccggaatgccaaagccgggtgttgtgcatctggtcactc |
| | | aggcagaaagcggcatgaccgggctgtatcgttttgaaacacagatgactgccggtaatggtaagcatagtgtatcgggtctgggt |
| | | tcaaatacctccgcgaaagaagctatccgcgtcggtttcgattacttcaaaggcaatttgaatcgggtaagcgcggccgcgaaatt |
| | | ctccgatcatgaatatcaccttcatgtcgttgaactgcataatactggcccaagcaccgcaaccagtcttgctgcgcttatcgctt |
| | | tatgttcgatattgctggcaaaaccggtgcaggaacagatggtggtgttgggcagtatgacgcttggtggggtaattaacccggtg |
| | | caggatcttgccgccagtttgcagctcgccttcgacagcggtgcaaaacgggttctgttgccgatgtcctcggctatggatattcc |
| | | aacggttccggcagagttatttaccaagtttcaggtgagtttttactcagacccggttgatgctgtttataaggcgctgggtgtga |
| | | attaacgtagtaactattttaatgaac (SEQ ID NO: 3) |
| 2 | pLG004 | ggtgaacgtttggttgatagggtagtaaaactagtaatcatcctataattagctatattcgtggttattagattgaaaacagataa |
| | | cattaacaaaatctataaatcgatttgaatgatttttttcatcaatactgttgtaagctcctgctatcaaaagttttgcacacaat |
| | | ctataagctcccagaattgcttgtataaatgctatcattggcgctgtcccgatcgagggagcaaggaggggactctcttgtgccat |
| | | gcgattaatcactggggctctaagtgaaatttagtgggactaaatactaattggaacgtgagataaaaatgcacaaatatccctct |
| | | ataatagttaatatcaaccttcgagaagccaaactgaaaaagaaggtacgtgagcatttacaatccttgggttttacaagatctga |
| | | ttctggagcgctccaggccccgggaaataccaaagatgtaatacgggctcttcatagttctcaacgagctgagcggatatttgcaa |
| | | accaaaagttcataacgctaagagcggcaaagcttattaaatttttcgcatccggcaatgaggtcattccggataagatttcaccg |
| | | gtacttgaacgtgtaaagtcaggaacctggcaaggagatctctttaggttagcagcattaacttggtccgtacctgtttcaagcgg |
| | | atttggaaggcgtctccggtatcttgtatgggatgaaagcaacggaaaattgatagggctgatcgcaattggtgaccctgtgttca |
| | | accttgcagtccgagataatttgattgggtgggatactcatgccagaagttcccggcttgttaatttgatggatgcatacgtcctc |
| | | ggtgctcttcccccttataatgccctgctgggaggaaaattaattgcatgtctgcttcgtagccgcgatctttatgatgactttgc |
| | | aaaggtctatggtgataccgttggagtaatatctcaaaaaaagaaacaagcacgtcttttggctattacaacaacatcgtctatgg |
| | | ggcgctcatcggtatataaccgtttaaagctggatggaattcaatatttaaaatcgattggatatacaggcggttgggggcatttt |
| | | catatacctgatagcttgttcattgaattacgtgattacttacgtgatatggatcacgcttatgcagatcattatatgtttggtaa |
| | | tgggcctaactggcgtttacgtacaactaaggcagctttaaatgcactaggatttagagataatttgatgaagcatggaattcaac |
| | | gtgaagtgtttatcagtcagctagcagaaaatgcaactagtattctgcaaacaggcaaaggtgaaccagatctaacctctttgctt |
| | | tctgctaaagagatagctgagtgtgcgatggcacgatggatggttccacgatcaattcgcaatccagaatatcggctttggaaagc |
| | | aagagatctatttgattttattagtaatgactcgctaaactttcccccgtttgacgagatagcgaaaacagttgtctaatcttaac |
| | | tgaagggggagtaagtgaattacgctattgataagttcaccgggacactgatattagcagctcgagcaacgaaatatgctcaatat |
| | | gtttgcccagtttgtaaaaaaggtgttaacctccgtaaagggaaggttatacccccatattttgctcatttgcccggacatggtac |
| | | gtcagactgtgaaaattttgttcccggaaattctatcattgtcgaaactattaaaactatttcaaagcgatatatggatttgcgct |
| | | tattgattcctgtcggaagtaatagtcgagagtggtcattagaattagtgttgccaacctgtaatttatgtagagcaaagataacg |
| | | ttagatgtaggaggcagaagccaaacgcttgatatgaggagtatggtaaagagtcgccagattggtgctgaattatcagtaaaatc |
| | | ttaccgtattgtttcatatagtggtgaaccagatccaaaatttgtaacagaagttgaaagagaatgcccaggtttaccttctgagg |
| | | gagcagcagttttcactgctttagggcgtggggcatcgaagggatttccacgagcacaagagttaagatgtactgaaacatttgcc |
| | | tttctttggcgacaccctgttgctccagattttcctgatgaattagaaataaaaagtttagctagtaaacagggatggaatttagc |
| | | tcttgttacaattcctgaagtcccttctgtggagagtatttcatggctaaaatctttacataccttcctgttgttcctgccagaac |
| | | atctattacagcaatttggccgttcctaaatcaaaaaacaagtattaatcatgtcgaatgtgtttattctgacacaatattgttgt |
| | | caacaaatatggcaccaacatcatcagaaaatgttggaccaactatgtacgcacaaggttcctctttattactttcagcggttggt |
| | | gttgaaacatcacctgctttcttcattctaaatcctggagaaaatgactttgtgggcgtttctggctcaattgagcaggacgtaaa |
| | | cttatttttttctttctataaaaaaaacgtttctgtacccagaaaatatccctcaatagatttggtttttactaagaggaataaag |
| | | aaaagaccatcgtttccttacatcaaagaagatgcattgaagttatgatggaagcacgaatgtttggccataaattagaatacatg |
| | | tctatgccttctggtgttgaaggagtggcaagaattcaaagacaaactgaaagtaatgttattaagttagtttctaatgatgacat |
| | | tgcagctcatgataagagcatgcggttactatctcctgttgcgttatctcaattatctgattgcttagcaaacttaacatgtcatg |
| | | tagaaatagattttttaggtcttggtaaaatatttttacctggttcttctatgctatcattagatgacgggaaatttattgaatta |
| | | tctcctaatcttcgctcacggatattaagttttatacttcaaatggggcacaccctccatggttttagtttaaataatgatttttt |
| | | attagttgagaaattagtggatttgcagccggaaccacacttattaccgcattatagagcattggtaaaagaagttaagaccaatg |
| | | gatttgaatgtaaccgctttagataaggtgccttcgaatgagttaccaatatagccaagaggcaaaggaacggatctctaagttgg |
| | | gacaatccgaaattgttaactttatcaatgagatttctccaactttacgacgtaaagcttttggttgtttaccaaaagtaccggga |
| | | ttcagggcaggacatcccactgaaattaaagaaaaacagaaaagattgattgggtatatgttccagtcacatccttcctctgagga |
| | | gagaaaagcatggaaaagtttttctcttttttggcagttttgggctgaagagaaaattgacaaatcatttagtatgattgataatt |
| | | taggattaaaagaaaactctggctctatttttattagagagcttgctaaaaactttcctaaagttgctagagagaatatcgagcgc |
| | | ctgtttatctttagtgggtttgctgatgatccagacgttataaatgcatttaacctttttcctcctgcagttgttcttgcccgcga |
| | | tatcgtgattgatactcttccaattcgtttagatgagcttgaagcacgtattagtttaattgccgataatgttgagaaaaaaaata |
| | | atcatattaaagaacttgagttaaaaatagatgctttttccgaacagtttgataattactttaataatgaaaagagcagtttaaaa |
| | | ataattaatgaactacaatctttgataaactcagagactaaacaatctgatattgctaataaagctattgacgagctttatcattt |
| | | taatgaaaaaaacaaacagctaatattatctcttcaagaaaaattagattttaatgctctggctatgaatgatatttctgagcatg |
| | | aaaaattgataaaaagtatggctaatgacatttcagaatttaaaaatgcattaacgatcttgtgtgataataaaataaagaataac |
| | | gagttagattatgtcaatgaattaaaaaaactcactgaacgaatagatacacttgaaataaacacatctcaagctagcgaagtgag |
| | | tgtcaccaatagatttacaaaattccatgaaatagcgcactatgaaaattatgagtatctttcatcctccgaagacatatctaata |
| | | gaatttctttaaatttacaggctgttggattgacaaaaaattcagcagaaaaattggctagattgacattagctaccttcgtttct |
| | | ggacaaatcattcaattcagtggctctttggcagatattatcgcggatgcaattgccattgctattggtgcaccacgttatcacat |
| | | atggagagttccagttggtattatttctgacatggatgcttttgattttatagagactatagctgaatcatctcgctgtctccttt |
| | | tgaaaggggccaatctttcagcatttgagatttatggagcggcaattagagatatagttgttcaacggcaaatacatccaacaaat |
| | | tatgaccatctggcattgatagctacctggaaacaaggcccagctacattccctgatggaggaatgttggccgagttgggacctgt |
| | | tattgatactgatacattaaaaatgcgtggtttatcagctactttaccccaattgaaaccaggttgtcttgccaaggataaatgga |
| | | caaatattgatggactacatcttgatagtgttgatgattatgtagatgaattaagagcattactggacgaagctggatttgatggg |
| | | ggaactttgtggaagagaatgattcatattttctatacttcactcataaggatccctaatggaaattatatttatgatctttattc |
| | | tgtcttgtctttttatactcttacatgggcaaaaattaaaggtggccccgtccaaaagatagaagatattgccaatcgtgaattaa |
| | | aaaattatagtgcaaaaatatcttcttgaggaggtggttaatggagtggagagcagtatcacgagacaaagcactggatatgttat |
| | | caactgcattaaattgtcgatttgatgatgaagggttgagaatttcagcagtttcagaatgcttaaggagcgtattatatcaatat |
| | | tctatatctgaaacagaagaagctaggcaaactgtaacctcgcttcgactcactagtgcagtaaggcgaaaattggtacctttatg |
| | | gccagacattgctgatattgataatgctatacatccgggcattatgtctatattgaacagcttggctgaattgggtgacatgatta |
| | | agttagaaggtggtaattggctaacagctcccccacatgcagtacgaattgacaataagatggctgttttttttggtggagagcct |
| | | tcctgtacattttcaacgggcgtggtagctaaatctgctggaagagttcgcttggttgaagaaaaagtgtgtactggaagtgttga |
| | | aatctgggatgcaaatgagtggattggtgccccagcagaaggcaatgaagaatggtcatccagactactatctggaactatttccg |
| | | gctttatcgatgcacctggcaatatgagtgaaacgactgcatatgtgcggggaaaatggctccatttgtcagaactttcttttaat |
| | | aaaaagcaaatctacttatgcagaatgtccgttgataatcacttttcctattatttaggagaaattgaagctggacgcttatgtag |
| | | aatgaattcgttagaatcgtctgatgatgtcagaagattacgtttttttctcgatacaaaagataattgtccgctaaaggtccgta |
| | | tcaaaatatctaatgggctagcaagattaagattaaccagaagattaccaagacgagaaacgaaggtactcctgctaggctggaga |
| | | gaatcaggttttgaaaatgaacattcaggaataacacaccatgtattccccgaggaaatattacccatagtgcgtagcgcttttga |
| | | agggcttggtattatttggattaacgaattcacgcgacggaatgaaatatgattaataaaaataaagtaactgaacgttcaggtat |
| | | acatgataccgtgaaaagccttagtgaaaatctgagaaaatacattgaggcacaatatcatatccgggatgaagggttaattgctg |
| | | agcgacgagcgcttttacagcaaaatgaaactattgctcaagctccttatatagaagcaaccccaatttatgaacctggtgcgcca |
| | | tacagtgaattgcctattcccgaagcagcaagtaatgtgctaactcaactatcagaacttggaattggcctctatcaacgccccta |
| | | taaacaccaatcacaggcacttgagtcatttcttggcgaaaacgcttctgatctggtcattgcaacaggtacaggctccggtaaga |
| | | ctgaaagctttctaatgccaattattggaaaattggcgattgaatcttccgagagacctaaatctgcatcccttccaggttgtaga |
| | | gcaattttattatatccaatgaatgcattagttaacgatcaacttgctcgtatcagacgtctttttggtgattctgaagcctctaa |
| | | aatactgagatctggaagatgtgcccctgtacgctttggcgcttatacgggaagaacgccttaccctggtcgtcgtagctctagac |
| | | gagacgagctttttatcaaaccccttttcgatgagttttacaataaactcgcaaataacgcccccgtacgtgcggaactgaaccgc |
| | | attggtcgctggccaagtaaagatcttgatgctttttatgggcaaagcgcatctcaggctaaaacctacgtctcaggcaaaaaaac |
| | | gggtaagcaatttgttttgaacaattggggggagaggctaattacccagcctgaggatcgtgagctaatgacccggcatgaaatac |
| | | agaatcgctgtccagaattactgataacgaactactccatgcttgagtatatgctgatgcgacctatcgagcgtaatatttttgag |
| | | cagactaaggaatggctcaaagctgatgagatgaatgagcttatcttagtgcttgatgaagcgcatatgtatagaggagcaggggg |
| | | agcagaggtagcccttttaatacgtcgcctctgtgctcggttggatattccccgggaacgtatgcgctgcatccttaccagtgcta |
| | | gtctagggtccattgaggatggagaacgttttgcccaagacttaactggcttatcaccaacctcttcgaggaaatttcgaattatt |
| | | gagggtacaagggaatcgcgtcctgagtcacaaattgttaccagtaaagaagctaatgcactggctgaattcgacctaaattcatt |
| | | tcagtgcgtagctgaggatcttgaatctgcatatgcagcaatagagtctcttgccgaacgaatgggctggcaaaagccgatgataa |
| | | aagatcatagtacactacgtaattggttatttgataatttgactggttttggtcctattgaaacgcttattgaaatagtttcaggt |
| | | aaagcggttaagctaaatatcttgagtgaaaacctttttccagactctccacagcaaatcgcagagcgagcaacagatgcattact |
| | | cgcattgggttgctatgctcagagggcatccgatggcagagtgcttattccaactcgcatgcatcttttttatcggggattaccag |
| | | gtctttatgcctgtatagatcccgattgtaatcaacgtttgggtaaccatagcgggccaactatacttggccgcctttatacgaaa |
| | | ccactggatcaatgtaaatgcgcttcaaaagggcgagtctacgaattatttacccaccgtgactgcggtgcggcttttattcgtgg |
| | | atacgttagttccgaaatggactttgtatggcaccagccgaacggaccattatcagaagatgaggatatcgatcttgttcccatag |
| | | atatattggtcgaggaaacacctcatgtacatagtgattaccaggacagatggctacatatagcaacaggacgcctttctaaacag |
| | | tgtcaagatgaggattctggttatcgtaaagtctttatacctgaccgagttaagtctggatcagaaattacatttgatgaatgccc |
| | | tgtttgtatgcgtaagacaagaagtgctcagaatgaaccgtctaaaattatggatcatgttacaaaaggggaagcaccttttacaa |
| | | cgttagtacgtacacagatatctcaccagccagcgagtcgtcctattgatggtaaacatcccaatgggggaaaaaaagtacttatt |
| | | ttttctgatggccgacaaaaagcagctcggcttgcacgtgatattcctagagatattgagcttgatttgtttcggcaatccattgc |
| | | tctcgcctgttctaaactgaaagatatcaatcgggaacccaaaccaacatcagtactttaccttgctttcctatcagtcctttctg |
| | | aacatgacttgcttatttttgatggggaagattcacgaaaagttgtaatggcccgtgatgaattttatcgtgattataatagcgat |
| | | ctggctcaagcttttgatgatagcttcagcccccaagagtcaccgtcacgatataaaatagcgttgcttaaacttttatgtagcaa |
| | | ttactattctctttccggaacaacagttggttttgttgaaccatcgcagcttaaatcaaaaaaaatgtgggaagatgtgcagtcca |
| | | agaagctcaatattgagagcaaggatgttcatgctttagctgttgcttggattgataccttactcactgaatttgcttttgatgaa |
| | | tctattgattcgacactacgaatcaaagcagctggattctacaaacccacttggggtagtcaaggacggtttggaaaagctcttag |
| | | gaaaaccctgatacagtatcctgctatgggggagctttatgtggaagttttggaggagatttttcgtactcatctgacattaggaa |
| | | aagatggtgtctactttcttgctccaaatgcactacgtctgaaaatagatctcttgcatgtctggaaacaatgtaatgactgcacg |
| | | gcactaatgccatttgctttagaacattctacttgccttgcttgtggtagtaacagtgtcaaaacagtcgagccgtcggaaagcag |
| | | ctatattaatgcacgaaaaggattctggcgttcgccggtagaagaagttttggtttcaaattcgcggcttctaaaccttagcgttg |
| | | aagagcatactgctcaactctcacatagagatagggccagcgttcatgccactacagaactctacgaactgagattccaagatgtt |
| | | cttattaatgataacgacaagcccattgatgtacttagttgtacgacgacgatggaagtgggggttgatattggatctctggttgc |
| | | tgttgctttaagaaacgtccctccgcaacgagaaaattatcagcaacgtgctgggcgagcaggccgccgtggcgcatctgtttcaa |
| | | cggtggttacatattctcaaaatggccctcatgatagttattatttccttaatcctgaacgcattgttgcaggttctcctcgtaca |
| | | cctgaagtgaaagtaaataatcccaaaatagccagaagacacgttcattcttttttagttcagaccttttttcacgagttaatgga |
| | | acaaggaatttataatcccgcagagaaaactgccatacttgagaaagcacttggtactacacgagatttttttcatggagcaaaag |
| | | atactggcctaaatctcgatagctttaataattgggttaaaaaccgtattctatctactaatggtgatttgagaacaagtgttgca |
| | | gcatggcttcctcctgttcttgaaactggagggctttctgccagtgactggtttgctaaggtagcagaggaatttttaaatacact |
| | | ccatgggctggctgaaattgttccacaaactgccgttcttgttgatgaggaaaatgaagatgatgagcagacttctggtggaatga |
| | | aatttgcacaagaagaattacttgagttcctgttttaccatggtttattaccaagttatgcatttcctacaagcctctgtagtttc |
| | | ttggtagaaaaaattgtaaagaatattagaggttcttttgaggtgcgaacagtacaacagcctcagcaatcaatttctcaggctct |
| | | gagtgaatatgccccgggacgtttgattgttattgataggaaaacctatcgctctggtggtgttttttctaatgcattgaaaggcg |
| | | aactaaaccgggcaagaaagcttttcaataatcccaaaaagtttattcattgcgataagtgctcttttgtccgcgatcctcataat |
| | | aatcagaatagcgaaaatacttgtccgatctgtggtggcattctaaaagtagaaataatgattcagcccgaagtctttggacctga |
| | | aaatgccaaggaacttaatgaggacgacagagagcaagaaatcacctatgtaacagcggcacaatatccacaacctgttgatcctg |
| | | aagattttaagttcaataatggaggtgctcatattgtttttactcacgcaatagatcagaaactggtgacggtgaaccgagggaaa |
| | | aatgagggggagtccagtggtttttcagtatgttgcgaatgtggtgcggcctccgtttatgattcctactcaccggcaaagggggc |
| | | acatgaaagaccgtataaatatatagcaactaaggaaacgcctcgcttatgctctggcgagtataaacgcgtttttctcggacatg |
| | | atttccgtactgatttgcttttattacgaataaccgttgggtctccgcttgtaactgatacttcaaatgctatcgttttacggatg |
| | | tatgaagatgcattatatacaatagcggaagcactaaggcttgcagctagtcgccataaacaactggatcttgatcctgctgagtt |
| | | tggctctggtttcagaattttacccactatagaggaagatactcaggcattggatctcttcctttatgatactttatccggcggtg |
| | | cgggttatgcggaagtagcagcagcgaatctagatgacattcttactgcaacactcgcattgttagaaagctgtgagtgcgatacc |
| | | tcctgtacagattgtctcaatcatttccacaaccagcatatacaaagccgtctcgataggaaactaggtgcatctttacttcgtta |
| | | tgcactatacggaatggttcctcgttgtgcttcacctgatattcaggtagaaaaattgtctcaattgagggcaagtctggaattgg |
| | | atggttttcaatgcataattaagggaactcaggaggcacctatgattgtgagtttgaatgaccgttctattgcagtgggaagttat |
| | | cctggtcttattgatcgacccgactttcaacacgacgtatataagtcaaagcatactaatgctcatatagcctttaatgaatatct |
| | | tcttcgttcaaatctgccacaatcgcatcaaaatattagaaaaatgttgcgctgatagcagcagtattgagtgccctaaagccctg |
| | | tagggcactcaaggttttcagtgcgtgagcgggctttaactgaagccataaatgtacgtatgggagaaaatgtgaccatttaactc |
| | | gccagcaactattgcacaatgtaaaattatgcccattgag (SEQ ID NO: 4) |
| 3 | pLG005 | acggtaatgctgagtttctccattaccattgcaaatgactcaccagagcagactgaacagcgcagaagtgggattgtggatacgtg |
| | | aagtgagagtaaggggaaaatccacaataatcatctatcgaacagggaggcgaactttacacgatggttttccgggagtgcttacc |
| | | cggggttcctcacctctggctaatctctggattgagtcgcgatactccaacaaaagcaacaagctaacgcagcaagaagttaacgc |
| | | tcatcgagagtaaaatgcacacttttatggcttactcgttacaataacagccagtttgttcagaaaaccggattcagtatggccag |
| | | aataccaaccaaaaaagctaaagcaaaaaaagggtttgaagaaacattatgggatgccgcaaatcagcttcgcggcagcgttgagt |
| | | cctccgaatacaagcacgtggtgttgagcctcgtgttcctgaaattcatcagcgataagtttgaaacacgccgcaaaaaaatgatt |
| | | gccgatgggcaggcagatttccttgagatggaagtgttctaccagcaggacaacattttctacctgccggaagaggcgcgttggtc |
| | | atttatcaaacaaaatgcaaaacaggacgatattgcggttcgtattgacaccgccctctcgaccattgagaaacgtaacccaaccc |
| | | tgaaaggtgcgctgccagacaactacttcagccgtcagaatctggaaaccaaaaaactggcatcactgattgataccatcgacaac |
| | | atcgaaacgctggcacacgagactgacgttgaaacgttatcgaaagaagacctggtcggacgcgtttatgaatacttcctcggtaa |
| | | gtttgccgccactgaaggcaaaggcggtggtgagttctacacgccaaaatgtgtggtcacgctgttaactgaaatgctcgaaccct |
| | | tccagggcaaaatttatgacccgtgctgcggctcggcaggaatgttcgtgcagtcggtgaagtttgtcgagagccatcagggtaaa |
| | | agccgtgatatcgcgcgtatggtcaggagctgacagccacgacgtataaactggcaaaaatgaacctcgctattcgcggtctttca |
| | | gctaacctcggcgaacgcccggcaaacactttctttagcgaccagcacccggacctgaaagctgactatattctggcgaacccgcc |
| | | gttcaacctgaaagactggcgtaacgaagcagaattaaccaaagatccacgttttgccggttatcgtatgccgccaaccggtaacg |
| | | ccaactacggctggattttgcatatgctctccaagctgtcggctaacggcacagcgggttttgtgctggcaaacggttcgatgagt |
| | | tctaacaccagcggtgaaggcgagatccgtgcacagatgatcgaaaatgatctgatcgactgcatgattgctctgccaggtcagtt |
| | | gttttacaccacgcagatcccggtgtgtttatggtttatgaccaaatcgaaggctgccgatccggccaaaggttatcgtgatcgtc |
| | | agggcgagacgctgtttattgatgcgcgtaacctcggcaccatgattagccgcacaactaaagagttaacagcggaagatattgcc |
| | | acaatcgccgatacttaccatgcttggcgtagcacgccagaagaactggctgcacggattgcgcgtggtgacagcaagctggaaaa |
| | | atatgaagaccaggcaggcttctgcaaagttgcgaccctgcaagatattaaagataacgactacgttctgacaccgggccgctatg |
| | | tgggtgcagccgagcaggaagaagacggcgtggcatttgagaccaaaatgcgtgaattgtcgaagacgttgtttgagcagatgaag |
| | | caggcggaagaactggatcgtgcgattcgccagaatctggaggcgctgggttatggggagtaaatgggagaaaataaaacttaaag |
| | | aagttgtagatattatcactactaaagttgatgtatcgcaaattagtctttgcgattacatatcaactgaaaatatgcttaccaat |
| | | tttggaggtatatcaatagcaaatagtaaacctagcacagggaaaataacaaaatttcattctggagatattttattctcgaatat |
| | | cagaacatattttaaaaaactatggcttgcagatcgaactggtggctgttctaacgatgtaattgtattccgtcccaaaaaacata |
| | | ttaattctaattatattttatcagtattaatggatcaaaaattcatcgaatatactgttttaacatccaaaggcaccaaaatgcca |
| | | aggggtgataaaacagctatattagattatgaatttaatcttgcaccagataaatattgccaacatatcgcaaaaacaaacactct |
| | | tatatttagtaagttaaaatccaatgaagtaataaataagtcattagaacaaatgtcccaaactctcttcaaatcctggtttgtgg |
| | | attttgatccggtgatttataacgctctggatgcaggaaatccaatcccggaagctctgcaatctcgtgccgaattacgtcaaaaa |
| | | gtacgtaatagtacagattttaaaccgcttccggcggaaatccgttcgcttttcccaagtgaatttgaagaaacggagttgggttg |
| | | ggtgccgaaaggatggagtattgttcgaactgaagatattgcattgaaaataggaatgggaccatttggttccaatattaaagtat |
| | | ccacatttgttaatgctggtgtaccaattataagcggccaacatctgaaagccctccttcttatcgatggggataataatttcatt |
| | | actccagagcatgctgaaaagctcaaaaactctgctgtatatagaaaagacataatttttacacatgcaggtaatattggccaagt |
| | | ttctttaattcctgaagattctgaatatgacagatatataatttcccaacgtcaatttttcttacgcgtaaatgaatcaaaatcat |
| | | cgccgtactatttgattcattattttaggtcagaaaaaggacaacatgctctgctttctaacgcctctcaggttggtgttccttca |
| | | attgctcagccttcaacacatttgaaaaatatatcattcctaaatcccccaatggttttgcttaaagagtttgaaaaatttagcac |
| | | ccctttattccatcgctttagtaaaaatagaaaatgtggagtctcactaacagccctccgcaacaccctgctcccgaaacttatct |
| | | ccggtgagctatccctggaagatcttccggatctcagcaccgatacagaagccgcataacgcattttgcccctgtaaaatcagggg |
| | | ctttctggtaaggttttctactgatacaggaatgcttaccagaaattagccagggttggagcgcgatatgagtctctctttcagtg |
| | | aagcaaaattagaacaagcgatcattgaactgttacaggatcaggggtatcaacatctgatcggcgataatgtcccacgttcgagt |
| | | ctcgatcaggtcattatcgaagacgatctccgtcattatttagcggcacgctaccagcctgatggcattactgaagaagagattca |
| | | gcgactgatcaaacagttcaccacgcttccggcttccgatctttatgaaagcaacaaaacattttgtcgctggctggcaaatggttt |
| | | tctgttcaaacgcgacgatcggcaacaaaaagatctctacattgaattgctcgacacccggcatctacctgccgcactgcgccaga |
| | | tatttgacgccgaagatgtcctgttgcaacaggctgcggaactcccgccctcctatattaatccgccgcttaacctgattaagatt |
| | | gttaatcagcttaaaatctccggcaaagataatcagagtcgtattcctgacggcattctctatatcaacggtctgccactggtcgt |
| | | ctttgaatttaaaagtgcggtgcgcgagcaggatgctagtattggcaatgcctggagacaactctgcaaacgctatcgccgggata |
| | | ttccgcaactgtttatctacaacgcgctctgcattattagcgatggagttaataaccggatgggcaacctgtttgcgccctatgaa |
| | | tatttttactcatggcgaaaagtcaccggtaatgaaaaccgtgaacaggatggaattccatcattgcactcaatgattcaggggct |
| | | gtttcatccggtacgtctgctggatgtaattaaaaactttatctgcttcccggataaagccaggcacgaagtaaaaatttgctgcc |
| | | gatatccgcagtactatgccgcccgcaaactctattacagcatcaagcaagcgcgtaaacctttcggtaacggtaaaggcggcact |
| | | tactttggcgcaacgggctgtggcaaaagttacaccatgcaatttttaacgcgtcttttgatgaagagcgtagagtttgccagccc |
| | | gaccattgttttgatcaccgaccgcaccgatctggacgatcagctttctgcgcaaatgtgcaacgccaaaaattacattggtgacg |
| | | acaccatccttcccgttaccagccgtgaagatttgcgtaatcaactggcgggacgcaatagtggcggtgtcttcctgacaacgatc |
| | | cataaattcaccgaagacaccgaactcctttctgaacgcagcaatatcatttgcatctcggacgaagcacatcgcagccaggttaa |
| | | cctcgaccagaaagtcatcatcgataaagaaagcggaaaagtgcgcaaaacttatggctttgcgaaatacctgcacgattcactgc |
| | | caaacgccacctatgttggctttaccggcacaccgattgacgcgacgctcgatgtcttcggtgaggtgatcgacagctacaccatg |
| | | accgaagccgttcaggatgaaatcactgtacgcatcgtgtacgaaggccgtgcggctaaagtgatcctggactccagcaaactgga |
| | | ggaagtcgaaaagtattacgaagagtgcgcaaacgcaggcaccaatgagtggcaaatcgacgaaagcaaaaaagccaccgcaacca |
| | | tgaatgcggttctgggtgatgaagatcgattaaaagccctcgcggaagattttgccaaacattatgaaaaacgcgtagccgaaggt |
| | | tccaccgtaaaaggcaaagccatgtttgtttgtgccagccgtgaaattgcctgggatttctaccgccagcttaaagctattcgccc |
| | | tgcctggtttgaagtgaagcaagcccccgatggcgtcttcctgacagaacaggagcaaaaagagttaccgccttctgaaatggtga |
| | | agatggtcatgacgcgcggtaaagatgacgacgaggcgctttatgatttactgggcacaaaagaatatcgcaaagagctggataag |
| | | cagttcaaaaacgctaaatcgaatttcaaaattgccattgttgttgatatgtggctgaccggttttgatgttcctgaactggatac |
| | | tatctatattgataagcccttacaaaaacataaccttatccagactatttctcgcgttaaccgtaaactggaaggcaaaagcaaag |
| | | ggttagtggtggactacatcggcattaaaagtcagatgaaccaggcactggcaatgtattcccgcattgatgccaccaactttgaa |
| | | gatattcagcaatcggtgactgaagttaaaaaccatctcgatttgttggggcaagtcttttacgactttgacagtcgggattattt |
| | | tagtggtgagccacaagcgcaattatcctgcctcaaccgcgcggcggaattcgttctgcgtacccagaaagttgaacgtcgtttta |
| | | tgggactggttaaacgcatgaaagccgcctacgacgtctgctgcggcagtgaagcactatcacagacagaacgtgatcatattcac |
| | | tattatcttgctgttcgttcaattgttttcaaactgacgaaaggtgacgcaccggatgttacccagatgaatgcacgcgttcgtga |
| | | aatgattgcagaagcgctaaaagctgatggcgtagaagaaatttattttcttggcgataaaaaagcggaatccatcgatatttttg |
| | | acgaagattatctggcgcgaattaacaagatcaaacttccggcaacgaagatccagctattacaaaaattactggaaaaagcgatc |
| | | agcgacttcaggaaagtgaaccagttgcaagggattaacttcacccgccgcttccaggctattatagatcgttataatgagcggcg |
| | | agaagatgatgtactcaacggtgaagaattcgatacattcagtcaggaaatgaccgatattatctatgatattaaaacagaaatgg |
| | | gcacctgggccgatttaggtattgatattgaagaaaaagcgttcttcgacattcttgctcatatgcgcgataaatatcagttcacc |
| | | tatgacgatgaaaaaatgctgtcgctggcaaaagagatgaaaagcgtggttgacaacacatcgaaatatcctgactggagtaaacg |
| | | cgatgatattaaagcgaaactgaaagttgaacttattctgcttctacacaagcataagttcccgccagtagcgaatgatgatgttt |
| | | atatgggggtactggcgcaagcagagaactttaagaaaaatcacatgagttgagtctgtcataatggagtatctcatcagatactc |
| | | cttctttatctattttgtaagagccaaaatagataaattatgttacgcataaccagctcatttaaactatctggtctgtttcctcc |
| | | ggttctacaaaaatagataggggtgcacctacgttaccaatactggcatcatggctacatacggtggtcagtttacgcttactcac |
| | | cattctttacttttttataagcgtcaataggtttgtaagcgactcgtcagaaccgtattgatat (SEQ ID NO: 5) |
| 4 | pLG006 | acctgccttcctttgatacaattcgtaacaggttactatcatcataaaaaagctcaacccgatgaactcgctaaaaatgagacaaa |
| | | tcatttatatctcgaaaaaacttgttacaatcatgagcgctacaccgaacttaaccatataaattatgtgtgttttgtttattttt |
| | | taaacgattacaactatccattatttacacaggtatcaaaatgttagcgcagctttttgagcagttgtttcaatcgatagactcta |
| | | cactgatcaccaatattttcatctgggctgttatattcgtatttttatcagcgtggtggtgtgacaaaaaaaatatacatagtaag |
| | | tttagagaatatgctccaaccttaatgggggcattaggtattctgggtactttcattggtattattattggtttactcaattttaa |
| | | taccgaaagtattgataccagcatccccgtattattaggtggcctaaaaacagcattcattacaagcattgtaggtatgttttttg |
| | | ccattttatttaatggaatggatgctttcttttttgccaataaacgaagtgcgttagctgaaaataaccctgaatctgttacacct |
| | | gaacatatctatcatgaattaaaagagcagaaccagactctgactaaattagtctcgggtattaacggtgatagtgaaggttctct |
| | | tattgctcaaataaaattactacgtactgagattagcgattcctcgcaggcacaattagctaatcacactcatttcagtaataagc |
| | | tttgggaacaacttgaacaatttgcagatctaatggcaaaaggtgctacagaacaaattattgatgctttgcgacaagtcattatt |
| | | gattttaatgaaaatttaactgaacagtttggtgaaaactttaaagctcttgatgcctctgtaaaaaaacttgttgagtggcaggg |
| | | aaattataaaacgcaaattgagcagatgtcagaacaatatcaacaaagtgtcgagtccctggttgaaacaaaaactgcggttgcag |
| | | ggatttgggaagaatgtaaagaaattcctctggctatgtctgaactgcgtgaagtgcttcaggtgaaccaacatcaaatcagcgaa |
| | | ctctcccgccatttagaaacctttgtcgccatccgcgataaagctacaaccgtattacctgaaatacagaacaaaatggctgaagt |
| | | gggtgaactgctgaaatccggagctgcaaatgttagtgcatctcttgagcaaaccagccagcaaatacttcttaatgcagattcaa |
| | | tgcgcgttgccctggatgaaggtaccgaaggattcagacaatcggttacccaaacacaacaagcatttgcctcgatggcgcatgat |
| | | gtcagcaattcctccgaaaccctaaccagcacgttaggtgaaacaattactgaaatgaaacaaagtggtgaagaattcctgaaatc |
| | | actagagtcgcactcgaaagaattgcatagaaatatggaacaaaatacgacgaatgtgattgatatgttcagtaagactggtgaaa |
| | | agattaaccatcaactatccagtaatgccgataatatgtttgattcaatccagacatcatttgataaggctggtgcagggctgact |
| | | tctcaagtcagagaatcaattgaaaaatttgctctatccatcaacgagcagttacatgcttttgagcaagcaactgaacgtgaaat |
| | | gaaccgtgaaatgcaatcattaggtaatgctctgctttcaatcagcaaaggttttgtcggtaactatgaaaaacttattaaagatt |
| | | accaaatagttatggggcagttacaagcattaatttctgctaataaacatcgagggtaatcgatcatggataagattatagggaaa |
| | | caattacctaaaaaagatcaagataatgaacattgggtatccatgtcagacctaatggcagggctgatgatggtttttatgttcat |
| | | atctattgcttatatgcactacgtacgtattgaaaaagaaaaaattaaagaagttgccgtagcctacgagaatgctcagttacaga |
| | | tttataatgctctggatattgagtttgcaaaggatttacaagactgggatgcagagatcgataaacagactctggaggttcgattt |
| | | aaatcaccggatgttttatttggcttaggaagcacagagctaaaaccaaagtttaaactcattcttgacgacttctttcctcgcta |
| | | cctaaaagttctagataattatcaggaacatattactgaagtccgcattgaaggtcacacaagtactgactggacaggaacaacga |
| | | atcctgatattgcttattttaataatatggcactatcgcaaggtcgtacacgtgcagtattacaatacgtttatgacataaaaaat |
| | | atcgcgacacaccaacaatgggttaaaagtaaatttgccgcagtaggttattcatctgcacatcccattcttgataaaaccggcaa |
| | | agaggaccctaatcgctctcgtcgtgtcaccttcaaagttgtaacaaatgccgagttgcagattagaaagattattcaggagtaag |
| | | agatgaaattatctatcgacatttcagaacttattcaattagggaagaaaatgttaccagaaggagtcgatttttttctggatgaa |
| | | tcccctattgactttgatcctatagatattgagttatccacgggtaaagaagttagtatcgaagatcttgaccctggtagcgggct |
| | | tatctcttatcatggccgccaggttcttttatatattcgggaccattcagggcgttatgatgcggctatcgtagatggcgaaaaag |
| | | gaaaacgttttcatattgcctggtgcagaactcttgatgaaatgcgccataaaaatcgatttgaaaggtatcatgcaactaaccgc |
| | | atagatggtttattcgaaattgatgatggttcaggtcggagccaggatgttgatttacgggtatgtatgaattgcctcgaacgact |
| | | taattataaaggaagtattgataaacaacgaaaaagagagatttttaaatcattctcattaaatgagtttttttcagattatagta |
| | | cctgttttcgtcatatgcctaagggtatctatgacaaaacaaatagtgggtatgtcgaaaactggaaggaaatatctaaagaaata |
| | | cgagaaaaggcaaattatgtttgtaatgattgtggcgtgaatttatcaaccgccaaaaacttgtgccatgtccatcataaaaatgg |
| | | catcaaatatgataatcaccatgaaaaccttcttgttctgtgcaaggattgccatcgaaaacagcccctccacgaaggtatattcg |
| | | ttacccaagcagagatggctatcattcaacgtttacgttcccaacaagggttattaaaagcagaatcctggaatgaaatatatgac |
| | | ctgactgatccatcagtgcatggtgatattaatatgatgcaacataaaggctttcaacctcctgttcctgggttagatcttcaaaa |
| | | ctcagaacatgaaattattgcaaccgtagaagctgcatggccaggccttaaaattgcagttaaccttactcccgccgaagtcgaag |
| | | gatggagaatatataccgtgggtgagctggttaaagaaatacaaaccggagcctttacgccagcaaaattgtaaattctaaaactc |
| | | cgtgaaagttaaggctttcacggaagataaataaagtttccctgatttgtgactcaaattacaaaagtagtttatggcataacttg |
| | | tctgatttttatggtgtaacaggtataaaagcatatgctatggttcgcctcatacttaaaacttccctcatatgggtgaaggttaa |
| | | agcttggtagacagaagacagtcacaatgaataaagcaataaattga (SEQ ID NO: 6) |
| 5 | pLG007 | acatcccgtcatcatgccatcacgacgcgctgagacgctgaaaaaataaaatcagcaccaccgtcagcgcgcagtgctttccccgc |
| | | ctcgcccgcccgcttcatgagacggttttaatgcagttgcattatgtcccgctcctcagtgctgcgctccatcctgattacaaaaa |
| | | ccgttatcaaaaacacatgcaaatagacgcagtcaaatgcgctaccgcctctcgcaataccttcaatttcatgataaaaaacatca |
| | | tccctaacaagagcattatcctcatgaaaaaagtatatgaactaaccagtgaagaagcactgtcatattttcttcgccatgactcc |
| | | tacacaacattagaattaccggcttatattaatttcaccacattattaaatgatattaattcatctatccataacaaaaaaattaa |
| | | aattgaaccaaccgccaaggagctgatgggtaaagatatcaattatgaggtgcttgtcagtaaagatggtctatatagctggcgta |
| | | ggataacacttatcaatcccctttattatgtctacttctgtagaaaaatcacagcaccagcaacctgggaaatcataacagaaaaa |
| | | ttcaaatcttttgaatcaaacgacctttttacatgttcaagcatccccgtcagaaaagacaactcgtcaaacattgctgcgtctgt |
| | | aatgaattggtgggaagattttgaacaaaaaagccttgcccttgctcttgaatacgaattcatgttcagcactgacatctcaaact |
| | | tctacccatcaatatatactcatagttttgaatgggtattcatatcaaaagaagaggcaaagaagaaaaaaagcaaaaataaccca |
| | | gggggattaattgacagccacattcaaatgatgatgaacaaccagacaaatggtattccactcggcagcacattgatggatacatt |
| | | tgctgagcttatcttgggtcaaatcgatatagaattaagaaaaaaaactaacgaactcaaaataataaactacaaggtagtacgct |
| | | accgtgatgattaccggatcttctctaatagcaaagatgatttagacataatatcaaaatgtttagtcaatgtattgggcgatttt |
| | | ggtttagatctaaactcaaaaaaaactgaactatatgaagacatcatacttcattcgttgaaacaagctaaaaaagactacatcaa |
| | | agaaaaaagacataagtcactccagaaaatgctctattcaatatatttattttcacttaaacatccaaactcgaaaacaaccgtta |
| | | gatatctaaatgattttcttaggaatttatttaagcgaaagacaattaaagataacggccaacaggttgatgctatgcttggtatt |
| | | atttcaagcatcatggcaaaaaaccctacaacgtacccagtaggaacggcaattttctcaaaactcctcagttttctttatggtga |
| | | tgacacccaaaaaaaattaacaaagctagaacaactccataaaaaactggataaacaacccaatacagaaatgcttgacatatggt |
| | | ttcagcgaactcaagcaaaaataaacctagagtggaataaatcttataagtcagctctatgcgtccgtataaatgatgaactcaca |
| | | aaagagaaaacattttctgtaaataatttatggaatattgactggatccaaggaaaagaaacaagccccaataaagccaaaatatt |
| | | atccttgctaagaaaaacaaaaatcgttgacacagataaatttgataaaatggatgacaatataacacctgaagaagttaatctat |
| | | tctttaaagagcacagcaattaatatcccaaagccatgttagtaacataacatggcttttttaaatcactcattatcagttatcaa |
| | | gaacgaacataacattctattccgaggag (SEQ ID NO: 7) |
| 6 | pLG008 | agttttttaaaggggttattttctaattatagtcccttaatttccattttcgtgtctaattatttgacattagtccatacaatagt |
| | | gactctaagatttaaggataacatcaactttcaacataagcacaataactatttttttattataattgaaaagagaattgaattat |
| | | tacctataaaacttaaaggagtataattatgaaaaaagagtttactgaattatatgattttatatttgatcctatttttcttgtaa |
| | | gatacggctattatgatagatctattaaaaacaaaaaaatgaatactgcaaaagttgaattagacaatgaatatggaaaatcagat |
| | | tctttttattttaaagtatttaatatggaatcctttgcagattatttaaggagtcatgatttaaaaacacattttaacggtaaaaa |
| | | acctctatcaacagacccagtatattttaatattccaaaaaatatagaagctagaagacaatataagatgcccaatttatacagtt |
| | | atatggcattaaattattatatatgtgacaataaaaaagagtttatagaagtatttattgataacaaattttcaacgtcaaaattt |
| | | tttaatcaattgaattttgattatcctaagacacaagaaattacacaaacattattatatggaggaataaagaaattacatttaga |
| | | tttatctaatttttatcatactttatatacacatagtataccatggatgattgatggaaaatctgcatctaaacaaaatagaaaaa |
| | | aagggttttctaatacattagatactttgattacagcttgtcaatacgacgaaacacatggcattccaactggaaatctattgtct |
| | | aggattattaccgaactatatatgtgccattttgataaacaaatggaatataagaagtttgtgtattcaagatatgtagatgattt |
| | | tatatttccgtttacttttgagaatgaaaagcaagaatttttaaatgaatttaatctaatctgtcgagaaaataacttaattatta |
| | | atgataataaaacgaaagttgacaatttcccgtttgttgataaatcgagtaaatcggatattttttctttttttgaaaatattactt |
| | | caactaattccaacgacaagtggattaaagaaataagcaattttatagattattgtgtgaatgaagaacatttagggaataagggag |
| | | ctataaaatgtattttcccagttataacaaatacattgaaacaaaaaaaagtagatactaaaaatatagacaatatcttttcgaaaa |
| | | gaaacatggttaccaattttaatgttttcgaaaaaatattagatttatcattaaaagattcaagattaactaataagtttttgactt |
| | | tctttgaaaatattaatgaatttggattttcaagtttatcagcttcaaatattgtaaaaaaatattttagtaataattcaaagggc |
| | | ttaaaagaaaaaatagaccactatcgtaaaaataattttaatcaagaattatatcaaatattgttgtatatggttgtctttgaaat |
| | | agatgatttattaaatcaagaagaattactaaacttaattgatttaaatattgatgattattctttaattttagggacgattttat |
| | | acctaaagaatagttcatataaattggaaaaattattaaaaaaaatagatcaattatttattaatactcatgccaactacgacgtt |
| | | aaaacttctcgtatggcagaaaaattatggctatttcgttatttcttttattttttaaattgtaagaatatttttagtcaaaaaga |
| | | gataaatagttattgtcaatctcaaaactataattcaggacagaacggatatcaaacagaacttaattggaattatattaaaggtc |
| | | aagggaaggatcttagagcgaataacttttttaatgaattgatagtaaaagaagtttggttaatttcttgtggtgagaacgaagat |
| | | ttcaaatatttaaattgataagtatttgaaatctattattagttcctgaaaaaatagctgtgtcttgtcaatataaatgacaagac |
| | | acagctattttttttaattttgaaatttataatt (SEQ ID NO: 8) |
| 7 | pLG009 | |
| 8 | pLG010 | |
| 9 | pLG011 | gcccatcattgcattaagtgatgggcggagcctttggcctctaatctggaactagctgcgattttcagactcgaatgctaaaaggt |
| | | cgtttcgcacctgaaatcaagctgctagagttctcttacggggttctcccctcgcatacgcgctgtagtaactgcggcgtaagagta |
| | | aatgtctgcacatatcatgcccgccatgatcattcggtaattcctggcgtgactggaagggagaccccgtgccacctatgggccata |
| | | tttttggaccagtgagtttcgtgaagttgccgccggagttgatgagtgaggccagtcttcttgctcatcttggcgttggccgtgccg |
| | | aacttaatgtcattagttggtacgccggtaggatgtaccataaattcgacattaaaaagaagtctggcaaggcgagggtgattaatg |
| | | cgccggatcgtcggctgaagatgttgcagaggaagatcgccgatttgctgacgcctctctatcggaggcgcaaccctgttcacgggt |
| | | tcgtgatcggtcgttctgtgaagaccaatgctcagtcccatctgggcagcaagttcatcgtcaacttggatttgaaggatttcttcc |
| | | cgtccatttcgtacggacgcgtgacgggcgtgctgcgttcgcttggcatgaagcgcgaggtcgcggaagctattgcgacaatttgct |
| | | gcctcaatgggacgttgccccaaggcgctccgagcagtccgatcttgtccaatatggtttgcttccgcttggatcggaggctgcggg |
| | | agttagccaaggacgcccgttgcatttacacccgctatgcggacgacctgagcttttccagctaccagccgctaatgggattgttcg |
| | | aaacgacaccaccggcttcagggcatttctcaccggatctgttgtcggaaaaacttaagcagattttcagcggtaacgggtttgtgc |
| | | tgaacccggacaaggctcactatgctgacaagcattcgcgccgcaccgtgacaggcatccggattaacgaggctctcaatgtcgacc |
| | | ggcggtttgtgaggaatttgcgggcagccctttactctgttgaaactttgggactggccgccgcccaggcaaaattcaaatccttgc |
| | | atggtggtaaagctgacgtcggccagcacctgcaaggcaaggtatcgtggttggggtacatcaaaggcgcatctgacccagtctttc |
| | | ggagtgtcgcatcccgtttcaacgctgcattcccgccgctcgcgctcgatattttgcccagtccccaagaaatacgagaacgatcag |
| | | tgtggctgattgagcactgggaaacagggggtgaccaaggcacggcgtttttcatgaagggtgtcggtctggtaacggcagagcatt |
| | | gcatatcgccgtccggtatagttgagttgtatcacccgacgaagccgtcgaataaattcgcggcgtccgtgaagcatcgatgcccag |
| | | atcgcgatctggccgttctcgaccatgcaatccccaacaacgaattctatgagctcgaaaccgccggcaaggcagccgcgacaggcg |
| | | atgccacgaccgcgatcgggtatcccggttatggacccggcgacagactgaacatccgacctggcgcagttacgtccctgccaacta |
| | | agagtgcggtgaagatggtcgaggtccagcagatgctgacgccgggcatgtcaggagggccattgctggatgtggatgaccgcgtcg |
| | | ttggcgtcgttcacaagggcggccatgatcatggtcggcaactcgctattgccatatctgaactgcatgcttggctgccctgacctg |
| | | attagccgaaccggctaatcgcgcaggcgccgaaccagccgtttccagcttgcttcactgttcatccagtcaggccggtccggttgt |
| | | cgaggcgttggagcaaatcgttcaggatgtccccgacagcgcgtgcagcgcaggtgcgatccgacggtttccatagcggtgttccag |
| | | caatgcgcgaggaaccagcggttgagttt (SEQ ID NO: 9) |
| 10 | pLG012 | tctatctaaaagtatacatatagtatttcaatgaaggttatattatattttgtggctgttttctaattttatcaataagattattg |
| | | caaaaggctgataaatataatagctttattatatcggaggagttgatttaactttcctatactatctgtataggctaataccaatg |
| | | gcaattttgccctcaaattggtctccttaatgtttatcaacgtgttatacggtagtgataaaacctcctccgatatttttctcatg |
| | | aattgggatattttaaatatgttttgctcagtaaccaagttgcatgaatgtaaaaatgttgaacaattatactattttttaggatg |
| | | tgaagaggctgaaattagtaggtttttatatagtggagtaattaaataccgctctttttccatacttaaaaaaaatggtaatttta |
| | | gaaatataagagcacctgtaaagtatttaaaagaaattcagtataagataaaggatgagctcgaaaaatattataccccgaaatca |
| | | tgtactcatggttttatagctggaaggaatataatcacaaatgcgaaacctcatataagaaaagaatttattttaaatatagattt |
| | | aaaggatttttttgattcaattaattttggacgagttagtcgtttatttcaaagccaacctctaaacttgccagagaatgttgccc |
| | | atgttttggcacatatttgttgctataatagagccttacctcaaggtgctcccacatccccaattatatctaatatgatatcttat |
| | | cgtttagacagacaattgaaggagttggcaagaaataatgcgtgtacttataccagatatgcagatgatataactttttcttttac |
| | | taaaactaaaaagtatcttccaaaatcaattgtttctttaagtaaagataataacattatactaggccatgaattaaaaaaggtaa |
| | | ttgaagataattggtttgaaataaatgaaggaaaagtaaggttacaacataaaacacaaagacaatcagtaacaaatattacggtt |
| | | aacactaaaattaatataagtagaaaatttaaaaaacaaacttcagctatggttaatgcattatttaaatatggagcatctaaagc |
| | | tgaaagagaatattttagtaagtatcacaagggttatatagcagaaaggcaatataataagattaaagaaaaaccaggtttattat |
| | | ttacacaaaaagtaagaggaaggttgaattatatccgattagtttgtggtaagaataatgaaagctggagaaagctcatgtataaa |
| | | tatactgtggcaataggacaacctaatgaggagtacaatagaacattgtgggatattgctggtgattcaacgttcattctttggtc |
| | | gaattcctcacaaggaagtggtttttttcttgaaaatattggtttagttacaaatgagcatgtaatcgaaggaatagaaaacagca |
| | | atattaataatgatctaataatactttggttaccaaatgaaagaaaagaatatattgagttacacttagcttggaaagatgataat |
| | | actgatttagctgtaattacttctaatatatcttttcttgacataaagcctttacaagtagagccagttcctatttatgatatagg |
| | | aacagaagtatatgcagttgggtatcctaattatgacgccagaggctcaattggaaaacctactattattacagcaaaaataacga |
| | | gtataattactcgagaaaggcaagaaagaatcgttatagaccaaccaatagtacatgggcatagtggtggggtcgttttaaatgct |
| | | gatggacgtgtaataggcattgttgcaaatggaaatgccgagggggaattaagagtagttcctaatgcttttattcctattgaaat |
| | | attattaaatgagcacaagttacgaactaaatcataaaattattattcttaaaataattaaatattttttaaaaccactagtttga |
| | | taactagcggttttttatttttggagtacat (SEQ ID NO: 10) |
| 11 | pLG013 | |
| 12 | pLG014 | ttataacaagcatttatagtttaaagatactttttctaatcaagtagaacctttgggtggcatcggcctatctcgcttttgtccaa |
| | | atgtgggctgatggggcatgaaaaatggaaatgccccattcctacttagtgctattactcattcatacctcgttaacgtgattttg |
| | | gattagttttattcactgtatatatcaacagttataatgaagcgcggtgattttatcgctttagttctgtttttaataagaaatat |
| | | ttcttgttaaaaacagaagtgaaatcataactaattgaaaattatatcgtttaacatttcagtttgtatttaataagactgattaa |
| | | atacatttcttacttttcacaccctctttcaaatcggtgagtataagaaagtgccagtaagctcataatatttaacgattatatcg |
| | | agtataatatctatcttttataagtatatttttgcgtaaaagtaagaatgcttattaatatactgttagttgcatcaagtgatgca |
| | | ttgcattctgtttagtattgttatagattctgccgcaagaggcgagagtttaactttctgctgttaatctgcggcggtcataagca |
| | | tgtttctttttaccggttttcagctagtctgatgatgccgttacgctgtacaagagaaaacaaaatcgcctcgttctttaagggtt |
| | | tgttactttggtagacatttcattaatttcccaaattgcagctaaagctgcattctcatccaatattcaagtacctctacctaata |
| | | aattgaaagattgctcatgcgttgaagggctgactcaatatctgggttttacgaattatgatgagctgaaaaaactgatatacccc |
| | | tcagttgaccacctatataaaggctttagcattcctaaaaaaaatggcgagtttcgaacgattgatgcgccaaaaaaggagctaaa |
| | | aacaatacaaagtttcctttcgaaggaattggttcaagtttactctcctcgtaatgctactcatggttttgtaaaagatcgaagta |
| | | tagttacaaatgcgtcgaagcatgtagacaaaaaatacgtactcaatttagatcttgaggacttcttcggctcaattcattttggt |
| | | cgcgttcgaaacctgtttcaatcgcatcctttgaacttacaccattcggtggcgacggttttatctcacctatgctgccacaatgg |
| | | caagttacctcaaggcgctccaacatccccgatcatctcaaatatgatcgcttatcgtttagacaagcaactgcagacattggctt |
| | | ctaaaaatagatgcacatatacacgctatgctgacgatataacattctctttcacacaaactcgtgggcgcttgcccaaatctatt |
| | | gttacgttaactcgcgatctacaactctctttgggtaatgagctaaaggagcttattactgagaatggttttgttatcaattctga |
| | | taaaactagaatagctgcgcgaagtaataggcaagaggtcactggtgtgatcgtcaatgagcgtatgaatgtgtctcgaaagtaca |
| | | ttaaacaaacacgttccatgctatatgcatggaaaaagtttggtctcgaagatgctgaagaaacctacttgagaaagtttcatgga |
| | | aaaacagtgtttgagaagcaccagcggcgaattgacgaaaagaaagggcagttttttaagaaagttgtaaaaggcagaattaactt |
| | | tattaaaatggttcgtggtgctgaagatttaatatacagaaaaatagcttacgaattctctgtattaattagcaagcctaaaccag |
| | | agcttgtgcaaaccccattggataaagcgtgtgattcaatatttatcgttgaaaatatggtggagaagagccaagggacagcgttt |
| | | ttgctgaagggaattggtatcgttacaaatgaacatgttgtgcgtggaatcgatgaggaactgtcagatcttttggagctatttag |
| | | gtatcatgagcaggaaactaagcgtccagttaaatttcaaaagtcatgcagatctagggatttggctattctaaaaccaactacaa |
| | | gctacaacggtattaagcgcttggatgttggtgatgatagtcagatcggtattggttcggttgtaaccgtcttaggttttccccag |
| | | tattcgcctggtgaaacgccttatatcaatacaggcaaaattatccaatctaaagtattgtttggtgaacgcgtctggttgctaga |
| | | tatacctgtaatccatggaaatagtggtggccctgttcttaatgaccgtcaagaagttatcggcgtagctgcaataggttcgccaa |
| | | cacatgaccactcaacgaaactccatggcttcataccaatttccacgttattagcgtatgtggaagaatgcaactaacaaataagg |
| | | atatgtgtcgcgaagccgacacctatccgaagtgttggacaagcccaagccaccttatataagtaaataccatcaagagtaatgtc |
| | | aaatccttacttttcctaatctctaaaagcctaaatagaacgaacggtctaagaagcttttgtccaacaacgagctagcttatgtg |
| | | atagctagtttgtgatcaaactttagatttttacactctacaaatagcttgaaaagtcacatttccgatcagactta |
| | | (SEQ ID NO: 11) |
| 13 | pLG015 | |
| 14 | pLG016 | cgttaataattatgttgttagcttaccacatttcattatcataaatacttacagtaggtaagataatgtaaaacatcgcgattaaa |
| | | tataaacttttcaaaaatgctgttaatattgatgaatatatatagtataatttacactgacagcaagggtaagaaaaaattgactt |
| | | tatggcggtgaaatcgccgtctgttatttaaagggtatacttaatttacacgcttattttatcttcgaagttttattcgatttgtc |
| | | taatcgctattaggagaagggtagaattttaacccttgctgttgtaaataggaggggattgctatggtttataagttaaattttga |
| | | attacagagcaatctagaggatattaaacaaaatttcaagaatttatcttgttttgaagatgtagctctccttttagaggtaccaa |
| | | aagaattattgtggaaagtacttataaaaaataaaggagctaattataaggcgtttaaattaaaaaagaaaaatggttcagaacgt |
| | | gttattttttcgcctactttaagtttatctattctgcaaaaaaagctagcttatattttggagtctaactataaaaaccataggca |
| | | atcatatggttttgtaaaaggaagaggaatagttgataatgctcaaaagcatttaaataaaaaatatgtactaaattttgatatag |
| | | agaattttttcgaaagtataacctttagaagagttagatcaatgtttatgacatattataaatttaatgaaaaagttgctacaacc |
| | | ttagcaaatatatgttgtcatccgaatggttttctgccacagggagcagcaacatcccctatcatatcaaatattatatgtaatag |
| | | aatagataaagagttttctaaattggccaaaaacaacagatgtcaatatactaggtatgctgacgatataacgttttctacaagca |
| | | ggagggttttccctcatgatattgcatatataaaagaggggtctatttttctgaatagtaatgtaattagtattgtggaatatcag |
| | | gggtttaagattaataaagaaaagacaagacttcagaattatagacaaaatcaaactgtaacgggaattacggtaaatgaaaaatta |
| | | aatgttaaaagaagctatgtaagaagaataaggtcaattcttcactgtattgaaaaaaacgttgaagatttacagaaagcagaacaa |
| | | attttcgaagaaaaatacccatttcgtcaaaagaaatatcttgataatattaatatgtttgctattttaaaaggtatgatttcaca |
| | | tgttgggcatgtaaaaggaaaagatgaccctttatatttgaaattagcaaagagatttaataaaatatcttatcttagtgaaacta |
| | | tatctccttttaaattagaatctttaaagaaatttcatgaaacttatacatatataattgattatgatgataaagttcctttagtt |
| | | tgttttgaaaacgataaaatggaggaaatattatacggtcaaggaacgggctttttattaaagggagttggcttaatcactaatgc |
| | | tcacgttatagaagatgcaatagaagctattaaggacaataaaaaatttaacaatgagtatggtatctcattttttagaggtaatt |
| | | atcctgatttaaaatataaagcgaaagtatccaaatatgacctagataaagatattgcaattttagatataaaaggttttaatata |
| | | gacaatcaaggatatgaatataacattgacatgaaagatgggcagaaaattgaattaatagggtatccagactacaaaatagggca |
| | | agaaataaaaatcgaaactggccacctaaaaggtattagaaaacatagagattcaaccggaacgttccattcacgacgggaaatat |
| | | cggcaatcatatacggaggaaacagtggcggacctataataaatgaaagtaatgaagtcataggagttgcagttaaaggtgctacc |
| | | cttcatggtgtttccccaagcgagattattccaattgaagatgtaattaatttaaactccagtaactcagaggtcagctccaagat |
| | | tgcaactaagcctcattaaaagatttaatattttaatgcgaaaagtcgatttttaatcaatctacttttttatttttcattttaag |
| | | ttgtaaatatctcttacaatttattttatttcaacgacatatttgggtatc (SEQ ID NO: 12) |
| 15 | pLG017 | gtggcaagattataccccatcaggcataagatgctttgacttataacgcatcagtttgaaacacaatggtgatgggggtcacaggg |
| | | gctgacatgtacttttaagattaaaaagcattaacatctacttttgaagaaaacagaaaaaaacaatcacaaacctttaaaaacaa |
| | | aaactatgccaattattaataaaaagtatcaagagcttcagttaacagatgagtacattaccgatccactgctcatggccctagcc |
| | | tggaagaaaagccatcactacatacgtaccacaaattggtatgctgacaactttgaactagacctgtcggctttggacctaatgca |
| | | gcactgtaaagattgggtcaagagaatgcaggacaaaaaagaatttaaattttcagagctacaacttgttcctgtaccaaaagcct |
| | | gtaaatgggagtttaagactgtcgaaaataaggttctatggcaaccttgtgatgaaaaagaacttaccctacgcccccttgcccat |
| | | atacccatagctgaacaaaccatcatgacattagtcatgatgtgcctagccaatacaatagaaaccaagcaaggaaacccagacac |
| | | cagctatgacatcgtccaccagaaaggtatcgtcaattacggaaatagactttattgtcagtatattgacgataaagcagagcaca |
| | | gcttcggtgcaacagtgacatatagtaaatacttcactgattatcggaaatttttaaataggccttatcattttgcgtcaaaagcg |
| | | caaggtgaaatttcgccggacgaagccgtttacatcatagaactagatcttgcgaagtttttcgatttagtaaacaggaagactct |
| | | aattcaaaagataaaaaaccatatcagtgagtcaataaacaataaagaaaacccactcgccaatcatttatttaaatgttttgcaa |
| | | actgggactggactgcatctagcataaaaaattatgacatatgcaagtcagacgaagtaacagaaataccaaaaggcatccctcaa |
| | | ggattggttgcagcagggtttctatcaaatatttacttacttgaattagatcaattcttgcataataaaattaacacagacataac |
| | | tgatgacattaaatttgttgattactgtcgatatgtcgatgacatgcgatttgtggttaaggttaaaaaatcaaaaaataataata |
| | | ccgcattcataaatgatgtaataaccaatcttcttaaaaatgagatagataatcttggactgataattaatcctaaaaaaacaaaa |
| | | gtagaaatttttagaggcaaatccgcaggcatctcgcgtagcttggaaaacatccagaccagattaagcggcccaatatcaatgga |
| | | tagcgccaacgaacaacttgggcatcttgagtcattattaagtctgacaaaaaccgattttgaaccaccgaaaaatggtaaatcaa |
| | | atagattagctgagattgaaaaagaccgtttcgatgtcagggaggacactcttaagcgcttttctgccaataaaatcagtaagata |
| | | ctaaaagagttaagacatttcatctcgcaggatatagatactgatggggaggttattgccggggaatgggattatctgcaagaacg |
| | | tttggcacggcgttttattgtctgttggagccatgacccgtcactggcactgctactcaagaaagggctggaacttttccctgatc |
| | | ctaagctattagaccctatacttgaacagctttgctcactcattgaaagcgataatgaaaaacaaagtgcagtagctacttattgc |
| | | cttgctgaaatatttcgacattcagcaatgactattcataaaaaagacacctatgcattccctgcacaagccaatgtggatgggta |
| | | ctttgaaaaaatacaacattgcgccgcgacattcattaataagcgcagcgcctctgacaacgaaacttggaacctgttaattaatc |
| | | aggctagttttctgttgcttgtgcgtttagataatacattagaaaaaaatggcactgatgccaggcatgatcttatcttaaaactg |
| | | gcatcaggctttagaacaattacacttcccactaaaatggatagcaagactatagcctcatgtattttgttggctagtcaattagt |
| | | taaagataacaaaccatttattcgctcctgcgcttctttgtgcgaaagaatttatgacaaagaacacgtcataaaattgaagaaaa |
| | | tagttagcataatatcacatcaaaacttatcattgtttaaatccttagtttatcattcacgacctttacaacagaagtggctaaac |
| | | tcagactccgtgaaaataataattaatgaatgccatatagatatacaacctttggcgacttctttaggcatgataaaaagtagtca |
| | | ctcattacttagaatcatatcaagacctgataacccatttgccaatgagataatggcattaaaactgatgcaagcccttttattgg |
| | | acaggattgtttgcctggataataaaaaagattatcaaataagtgtagcaaacaccaaagtgacgtttcataactactccaaccct |
| | | ccaacatcgaatgtcttcgatgcaggaatggatatggatgcaaaattattcaaatcatcgggatgggtcgattctattttcacgga |
| | | tgatgcagacactcaaatattgtatagagttgccatgtgcatccgttcagtactactcggcaaacaagactggacagattttggtc |
| | | aagcaatitcccccaaacagggttatcggggiattaaaactagtagagacaaacgtcaattggggatgatgacaacacctgagtcc |
| | | attgccggtgagaactctcaggtttctggttggcttaccacactcttatccaagttgcttgcctggccgggaatttcagtgggtga |
| | | taatggatatcaatggccagcaatttttacagtagatgctgtcagaaaactagttgatgctcggctgagtaaacttaagcaggatt |
| | | actgcaaactatcaggaactccgggacttacagaaaaaatacagttcaactggtctgactcgaaaaaagccctaacagttgctatg |
| | | gtccagtcaaaactgcctgcaacgaaagattttgtcagccatggacttcttttaaactccgcaaagtatagagtgattcatcgcag |
| | | acatgttgctgaagtggctgatttagttgtaaaacacacgcttgcacaaaaaacaactcaacgaactcatggtgaaaaaatagaga |
| | | acattgatttaatagtatggcctgagctcgctgtacatagtgacgatttggatgtactcatcgccttatctagaaaaacgaatgca |
| | | atcatatactcgggcctgacatttattgagcaacctggaatcaaaggaccaaataattgtgccgtttggattgtcccacctaaaag |
| | | caatagcagccagaaagaaatgataagacttcaaggcaagcataatatgatggaagatgagaaaggccgggttgaaccctggagac |
| | | cataccaattgatgcttgaacttgttcacccccaatttactgataaaaaaggatttgttctcacaggctccatttgttatgacgca |
| | | accgacatcgcgctaagtgcagatctcagggataaatcaaatgcttatcttgtagcagcattaaacagggatgttaatacattcga |
| | | ttccatggttgaagcactgcattatcatatgtaccagcatgttgtgctcgttaactcaggggaattcggaggatcttacgctaaag |
| | | caccttacaaggagccgtttaatcgtttgattgctcatgttcatggcaatgatcaggtagctataagtacgtttgaaatgaacatg |
| | | tttgatttccgtcgtgataatataggaaaaagtatgcaatccgggttagataaaaaaactgctcctgcaggaatcataatgtaata |
| | | aatattagatatttttatattagaggtgaggagatggcgtcacctctaatattttcgctgattgtatttagcatcaaataataaag |
| | | gtacaattaatttaagtgactatcatgaaaaaattagttccgccatatcaagtaaccccggcacaaatctatcgttccgttgccag |
| | | ttctacagccattgaaaccggaaaac (SEQ ID NO: 13) |
| 16 | pLG018 | gcttatcccctccctactggtaacagcgttatcgaacttggaataccatcatttatacctatatctgttggtagatgtgcattgaa |
| | | gtgggttgaccttgagagagccagtatcgcgggcgcaggaatgacaggtaagcactaaatttcaggcacaaaaaaagctgccctta |
| | | agcgacttgattgtatcttttggtgcgaaggccggactcgcacataaaacttaacctcatgatttaaaaaagataacaaaaaacag |
| | | tttaattttataccaacacagataccaacacgaaaattcattgttcttgggtatcgaacccggacaaacatgactgagttgtatta |
| | | gctcagatttgacctgacacagttatggcacagatctcaacctaatctgacaggcagctccgtatcagaagcggaagtgatgacca |
| | | agtttaagcatcattcttggcttgtatgagaatggcactgatctagcgatcagtaaaacttcatcgcttcatcgaaatgccctaaa |
| | | actttagattaggagaaagttctatttatgccagctacaatttttcgggggagttaccttaccgctaaataaaccgaaaatcgatg |
| | | ctggacaatctctaactcggtggtcaattttcgttgaccactacataatggtcctcctgatgcatctgatgtatcaggaggaccgt |
| | | ccttaaacacgacaaaacctgtgatacttaccatggattcctctatgaaggaaaggtagtatagccattttgggtgatacatacag |
| | | tgaatgtcattgctgtagttgaagtgagtaagagcgcttaagattaagttgagagaaaatgaaactacttgataaaaagtattaca |
| | | acctcgagcccaaatatgagtaccttaaggactcatttattttaggactggcatggaaaaaaacagatagttttgtaagaactcac |
| | | aattggtatgcagatattttagagctggacaagtgtgcgtttgatattagtgatgaagtcactaattggtcaaacgagatctcaaa |
| | | gaacgctctttccaaaagtgatattgaattgataccggctccaaaaggagcaagctggttcattaatcaaggtaaatggactacca |
| | | ataaagataatagaaagataaggcctttggctaacatatctattagggatcagtcttttgctacagcagtaacaatgtgccttgct |
| | | gatgctatagaaacaagacagaaagactgttcgttgagcaatcttggctatgctgagcatgtaaagaacaaggttgttagttacgg |
| | | aaataggcttgtctgcgattgggacaatgaaagggcaagatttcgttggggaggaagtgaatattataggaagttctcttccgatt |
| | | atcgaagctttctacaaagacctatctatataggcagggaaacagtaaataaagttagcggaattgatgatgtatatatcatcagt |
| | | ttagatctgaaaaattttttcggttctataaaaataaaccttctgttagaaaaaatcaaaaaaatatccgctgatcattatgcagc |
| | | taaattcataaatgataatgaattttggactttggcgaatcggattttaagttgggattggcctgaagaatctttatctttacttg |
| | | agagtttggatataaaagaaaaaaatgttggtcttccccagggattagcttctgctggtgctctggcgaatgcatatctcattgag |
| | | tttgatgaatctttaatttctaagcttcgtactaagatagaagacagccaaataatactgcatgattattgtcgatatgtcgatga |
| | | tattagattagtgatttcaggagaagcactagaaagtaataagattaaggaatctattcatgcattagttcagggcattcttgatg |
| | | agacattggctcaaaatccgtcagataatgaaccatatttaaaaattaacgatagcaagacttatattcttgagctttcagacatt |
| | | gacaacggaagtgggcttacaaatcgaatcaatgaaattcagcatgaagtaggagcttcgagtatcccagagcgtaacggactcga |
| | | taataatatcccggcacttcaacaattattactgaccgaacaggataatttttccgaggatgttgatagtttatttcccgggttta |
| | | aaaatgataagtcgataaaggtagaatctgtacgtagattttctgcccataggctggaaaaaagtttggctaaaaaaagcaagcta |
| | | atttcacctgaggagaggaaacaatttgataatgaaacctcactgattgcaaaaaaattattaaaagcttggctaaaagatccatc |
| | | aattatggttatcttccgcaaagcgatagctatcaatcctaatctagatgcttatagcaccattcttgaaattattttttcaagaa |
| | | tacaacgcaatcgtgataaacgagataaatatataatgctgtatcttctttctgatatatttcgtagcgtcattgatgtctatcga |
| | | aacctagaatcagaatacgtcgacgattatcaaaaattgatgggtgaagttacattgtttgcccaaaaaatactttcctgcaaatc |
| | | ttttattccaaattacgcatatcagcaagcattattttatctcgcagtgatcaataaaccatttatagctagtaataaagcttctt |
| | | ttgatcttgcaaggcttcaatgcgtcttaattaaacagcatttagaaccgttgaatagtagtgatggatacctatttgaggtatct |
| | | gctcaaatcagtaaagactaccgagcaaatgccgcttttctactttctcatacaaatagtaacaaagtagtagacttaattatcga |
| | | aaaatttgctttccgaggaggtgaattctggaatgcaatttggaaagaaattgttaggatgcaagataaagataggattaacgaat |
| | | ttagatgggccatatcaaaatatgagtcaaagccaaatagttcggagcactatctttcatcagtgatcagtttcaaggaaaaccca |
| | | tttagatatgaacatgcgcttctcaagctaggtgtagcattagttgaactctttgatgatacagagaaaaacgtatggcaacctga |
| | | tggtaagcagtattctccacatgaaataaaagtaaaattagaaggtaactcaacctcatggggtgaattatggcgtccaaatttta |
| | | gtatttcatgctcgatagataagaaaggtgaacctggtaaagacccacgctatataagccctgagtggttggcaaattatccacag |
| | | actcaaaatgatgaacaaaaaatctattgggtttgcagtgtgctaagaagtgctgctttaggcaatgtagattatactcaaagaaat |
| | | gatttaaaacttgataaagctaagtatgatggtatccattctcagttttacaagcgacgtatgggaatgttacatacaccagagtca |
| | | attgttggttcatatggaactataacagattggtttgcaagttttcttcagcatggattgcaatggccaggtttttcttcttcgta |
| | | tataagccaagaagatatattgtcaattactaatattattgagtttaaaaactgtttattggaacggctaggctacttaaataagc |
| | | agatatgtatttcatcgaatgttccaaccttaccgactgttgtcaacaggcctgaattagcatctaaccattttagaattgttacg |
| | | gttcagcagttatttcctaaggatactaatttccatccttctgacgtgactttggctaatcccgatgtgcgctggaagcacagaga |
| | | gcaccttgcggaaatctgtaagctaacggagcaaactttaaatgcaaaacttaaaactgagtctagggaacatacaagcacagctg |
| | | atctaatcgttttttctgagttagcagttcacccagaagatgaagatatagttagagcactggcatttagaaccaaagccatcatt |
| | | ttttccggctttgtcttctgtgaacaagatggccgaatagttaacaaagctcgttggattattccagactcttcagagtctgggac |
| | | ccaatggcgtgtccgtgatcaggggaaacatcatatgaccagtgatgaagtggctcttggcattcaaggatatagaccatcccaac |
| | | atattatttcaattgagggtcaccctgagggaccatttaaattaactggtgcgatttgctacgatgcaacagatataaagcttgcg |
| | | gcagatctgagagatttgactgacatgtttgtcattgcagcatacaataaagatgtagacacatttgataatatggcttcagcact |
| | | acaatggcatatgtatcagcatattgttattacgaatacgggagaatatggaggctcaactatgcaagccccgtacaaagagaaat |
| | | atcataaattgatttctcatgctcatgggactggtcaaatagcaattagtactgctgatatagatttagcagcattcaggcggaag |
| | | ctacaaatatataaaaagaccaaaacccagcctgctggatacaatagaaaacattaaggatttttatggatactttagttaagtta |
| | | gctacaattatttctccattaattagtgctggagtagctatttgggcaattttggttgctaaaaaaaccatcagtgaaagcaaaga |
| | | aattgccaagaaaaccatcgctgatacggcctaccaagcatatttgcaattagccatggagaacccacaattttcgaaaggctaca |
| | | gcgcagattgtagacaggagcgagaccctatgtatgatcaatatgtttggtacgtggctaggatgatattctgctttgagaaaatc |
| | | atcgaggttgaagtaaacttaaaagatagttcttgggcaaatacgttggaaaaacatttgaagtttcattctgaacattttaagaa |
| | | aacgaatgttgtcgaagaggctctctatattccccctattttggatctcataagatgtgcagctaactaataacttatcccaatag |
| | | gattatattccacacgataagcccactggaaaatgtaacatcccaagatagtttttgggattgtttcccagtgggcggaaagtatc |
| | | atgatagttgtcacccccggtggagctgcaaagatttttatggggtgggtgttacattgcgcgataaatttgaaatcgtggcttta |
| | | atttctgcttcttgctcaaaagcagactgtcagatttgattgtgtgctgccagtgagaagcgtcagatcaagtctgagctaataca |
| | | actgagttaagatgccgaaatctg (SEQ ID NO: 14) |
| 17 | pLG019 | agggatacgccacagcaagaaatagtttacttattcctcattttgtcgactaaaaatcgacattaaacaaaaaattcaaacttaat |
| | | cactttcgggaaaaatgtgacaaatatatgctcggactggttgcggggagcgtgtaacatggatacaaatcaaaattattgccagc |
| | | ctcactgatggattactggtgtcaagagccccccttcgggcatgaaacggctggctaattctgtacagactgtaatctaaggacga |
| | | taacgcatgacatatcaggcaattttcactggctgggatgatctgacgattgaagaccttctggtcgcttaccggaaagcaaaagc |
| | | cgatagcttctttgagaatacatttcctgttgctatcaaatttgccgagtatgagcaggaattacttgaaaacctgcaaaaactct |
| | | tagatcttttgcagagcgaagatggattcagtagcaataagaagttgattggcaaatttcgtttgttaccgaaaaaattaaccaca |
| | | aagaaaaaacatgaatcccaaaatggacacgtccacttttctaatcctaaacgagcagccgaccatttatttaataattttgatct |
| | | gataccagagtttcgtattattggtgacttcccggttgatagtcacattatctctgcactatggattaacatggtcgggcataaat |
| | | ttgatgccagcttagataactgttgctatggcgcgcggctaaagcgtattcgtaatgatgaattatttagcaatgagcaggataat |
| | | ccattccatatcagtgccgtgggttcttttagcccctacttccagccctaccaaaaatggcgtggtgatggcttaaaagctatacg |
| | | tgacgagttggaaaaagatcgtgacattatcgccgcctcactggatttaaaaagttactatcattttattgatccactggctataa |
| | | cctctgatgatctctataacacactaaacataaaactgactgaggatgaaaaagcgtttactgcacagttagcagtattcttaaag |
| | | cactggtctgacggcgcagcggcatttggaaagaaaatagcgtacaaaacacctgttattaatggtggtctggtcattggattaac |
| | | agccagtcggatcatttcaaatatattgctacaccattgggataaattagtcattgaaaaactatcaccaattcactacggtcgtt |
| | | atgtcgatgatatgttccHgtaatacgcgatacagggacaattactaataatcacgaatttatgttattgctgcaagataggcttg |
| | | gcaatgattgcgtttatttgaaaaacgagcaaaaacaaatatggcaaatacagcagggcgagcatttccagggtaagaccaccatc |
| | | cagttacaatccgataagcaaaaacttttcgtgcttcaagggagggctggaatagacctgctcgacagtatcgaaaaggagatcta |
| | | cgagctttctagtgaacaccgcttgatgccttcaccggatcaactggaacactccaccgcagctaaagtcctttccgctgccggta |
| | | gtgtaggtgaaaatgccgatactctgcgccgtgcggatggattaaccattcgtcgtttgggctggtcactgcaattacgctacgtt |
| | | gaaacactggcacgagatctgcctccaagtgaatggaaagaacagcgggaagagttttatcagtttgcctacaaccatattcttag |
| | | ggctgataatctatttgcacattttagttatctgccaaggctgcttggctttgctatcagtatgaatgaatggcagcacgcggaaa |
| | | aaattgtacttaaagcttacgaatccatcaacctgttggcatcggtgattacttcaggtaaggaagtgaatataaatggttgcaaa |
| | | actcgagcagtaaatgatctttggcgctgtataaaaggcacattaagctggctatttgttgatgcagcgacacgatattacagtcc |
| | | tgacagattatttcttgataaacgttcaaagaaagaagagtgccttgcggatacattttttaatcatatttcacaaagtctgacga |
| | | atctaaaggatttactggatcttcgctttgattcagcagatttttatttaaaagcgccattggtagctcgagctgatttagcaaag |
| | | gaaccttataaacagatcgtaaagagtcagtcggcagaaaaacttgttaatcagcgtgatagtaaaaaagaagttaaaatactgaa |
| | | attaatgagcgactcatcgcttattgatattgacgttattaagctatttttgaaatcaaccaagaatacccgactggaaaaagtgg |
| | | ctaaaggaaatcgtaagaacgaaagttacctaccttacattttccctacacgtcctttaacacccgctgaaatatcagaactggcc |
| | | cccgaatgtgttggattaccctccacatccgacaaaaaaccagatgagagaccgtccaccatttgggcaaaatatactcaagcatt |
| | | acgcggagtatggatcaaaccgacgttgctagcatcggagcaggactcagatgaagcgacaaaaaaagctcggcctaagaaattca |
| | | ttcatattggcacagacaggaaacataaagttgtcgttgcgctaaccagcattaaaacagaggaggacgactgggctaaaatggcc |
| | | tgcaataaatctaacttgtcccgttcaaggtaccagcggatttctgaactggttaatgcaacattgaaactatctcctaaacctga |
| | | ttatgttttattccctgagctttcaatcccgttacgctgggttaacagtattgctgatcgtttgagttcggcgggtatcagtctaa |
| | | ttgcgggaacagaataccgccacttagacgataatcaactgaagagtgaggccgtacttgtcctttcagataacagactcggctat |
| | | ccagcgagtgtcaaaatatggcaacccaagctggaacccgccgtaggtgaagatgaggcattattttcaatttatggtaagtcttg |
| | | ggattcgacacttaatgttaaacaacgtaagccggtatatattcatcacggcgtcaattttggcgttatgatttgctctgaactcc |
| | | agaatagtaaagcgaggatccgttttcagggcgcactcgatgcattaatggtattgagctggaataaagatctagatacgtttgca |
| | | tcgttgattgaatcagcagcgctggatattcatgcctatactattttagtgaataaccgaaaatacggcgatagtcgcgtacgttc |
| | | cccggcaaaagaaccctttatgcgtgatattgctcgtgtgaagggcggtgataatgactttgtggtcgctgcaacgctggatatcg |
| | | actcgttaagggcatttcagagcagggcaaaacgctggcctaaaggcggcgataaattcaaaccgttacctgaaggattccagttg |
| | | gcaaagaaccgcaaaaagctaccgccaaaataagaaactgattttcgctattaataatcagggtatttttgcgtgagatgttggta |
| | | aacatgatgtagcccttgccactcatgaccaatcgcagtatctttctcccgcgcctgcaaaatcaggcgtcgggattagcctcctg |
| | | aagaaatcttatcggcgacacatgacgcgccagcgtctttttttgtgttgttcgcacggttacatc (SEQ ID NO: 15) |
| 18 | pLG020 | ttttcaaaggagtttcgctttccaaatatacaagaaatcattatttctaaaggtatctataagtggatgattcgttttattggaac |
| | | agttgcattctcgttaattaaagcggctgcttccgaccggcgaatggtcattcagaagctgagaatgtggttattttttaaagagg |
| | | aattggcatgattattagccttgaagagcttggccttgcctaccgaaaagcaaaagtcgatctgtactattcatcccatgtttcgc |
| | | tggaagcaattgcgtcttacgaagagtccctacatacgaatctgacggttctgcaggaaaaaatacaaggtgacgacgaatcatgg |
| | | gtggaagagaatgagttcactggcaactggtttctggccacaaaatctgtagacatgtcttgctgggaacagcagcgagaaccgca |
| | | agctaacggtctcatattttcctcacctgctgaaaagtgggcatatgcttgcaacccaatggctgataaaaacgaacaaaaaaaaa |
| | | tcaaagccgagtttcgagtaatggctcaatgcagtctggattttcatgttctctcgactctttggatgttaaaagtcgggcatctt |
| | | tttgatgccaaattatctacctgtgcttacggtaaccgcctgcgccgtactctagatggaaaagacatcaatgcactttcaattgg |
| | | ttcttttcaaccttacctcagaccttttcgtgattggcgtgacaatggcattaacgccatgcggagcgcgctaagtgaaagcaaaa |
| | | aaatcgtggcactcactgctgatgttagttctttctatcacgaactgaatcccgggtttatgcttgatccaaccttcgtcaaagat |
| | | attttggagttggaactcactgctgaacaaagcaagcttaatcgattattcattaatgcgttaaaagcatgggcaattgagactcc |
| | | gttgaagaaagggttaccagtaggtctccctgcttcagctgttgttgccaacgtagccctgatcgagctggatcgcgttattgagc |
| | | agcaagtcgcacctatatattacggacggtatgtagatgacatcattctggtcatggaaaatggtgcgaatttccgttccatggca |
| | | gagctatggcaatggttgttcgcccgttcttccggcaaactggactgggtaaagggcgaggaaaacaaacagatcagttttcaacc |
| | | aaactacctgcatgacagccagattcgttttgcaaatgcgaagaataaagtgtttatccttgcgggtgactccggaaaaaccttag |
| | | tggaagctattgctcatcagatttatgaacgagccagcgagtggcgagccatgcctcggttaccgcattcctcgaacaatgttgga |
| | | actgatttgcttgctgcaactcaaagtaatggcgaagtcgctgacaatttgcgtaaagcagatgcactgactatgcgtagggctgg |
| | | ttttgccatcaaactacgcgactttgaagcctatgagcgtgacctgcaaccgggcacatggaaaggccatcgccaggcattttttc |
| | | gggcatttattgatcatgttgtggtgctgccacaattctttgatttatcagtctacctaccccgagtgatccgactggccacggcc |
| | | tgtgaggactttgtcgaactgcgcaaacttatcttagcgctcgagaatatttgcgatgaagttcgagaaaattgcctccttaccat |
| | | caaggcgtgtcctgatgatcacctcccttttgaagcagagattattggcaaatggagggctcagctttttagcagtgtgcttgaag |
| | | ctatcgttgcggcatttcctccgcgtatttccaaggtgggtaagcaaacctggaatgaccatttaaaaaactggcacgcccggtgt |
| | | gggctagacattcaatattcgggtcgtgatttttcattaaagggctaccaagaacagcaggcgagattattctctttcgacttagc |
| | | gcacatgccattccgctttattggtctaccaaaagagatgattgctcaacggggcatacccgctccgaaaacagtagcccactgtg |
| | | cggaagcagcagaattactgcctgatattgtcgttttgggtaatcaggttgtagcaaaatggtgcaaatttaaaatcattccacat |
| | | ggactgctatttgccacccggcctttcagcctgccggaactctttatcctaaacaatgaggcttatacagcttcagctcagcaaga |
| | | aatgcgagctattattttcgctgttcgcggttttgtactcggtaataaaacaccttgtgtcgataaacaaggcatattgcaaatcc |
| | | ctgacggccaatctgctggaaaatatggggttgccatatctagctggaaaacgtccatgtcaagctggactgcggcggtcatgcgt |
| | | tcagccgatccggatgcaaaccgttacgctcgcttatgtcgcttgcttgatggtgtgatagcccaaccacataacagtcgttactt |
| | | aattctgccggagctctcactccctgcgcactggtttattagaattgcccgtaagttacaaggtcgcgggatttcacttgtcaccg |
| | | gcattgaatatttacatgccagtaaagcaagagtacgcaatcaggtatgggcttccttgtctcatgatggattgggttttccttca |
| | | ctaatgatttaccgtcaggacaaacaacgcccagcactgcatgaagagcaggaattacaacgaatagcagggctagaaatgaaacc |
| | | agaaaagaaatggacaacgcctcccatcattcaacacggtgattttcgtttttccttgttgatttgtagtgagctgaccaatatta |
| | | gttatcgcgcagcgctgcgtggcaacgttgacgcgctgtttgtgccagaatggaatcaggatactgaaactttcaatgccttggtc |
| | | gagtctgctgcgctagatatccatgcttacatcatccaatgcaatgaccgccagtatggcgatagccgcatccgaggccctttcaa |
| | | agatagctggaagcgtgatgtattgcgagtcaaaggtggtattacagattattgtgtaataggcgaaattgacgtacattctttac |
| | | gacaatttcaaagtagctatcgttctcctggtaaaccctttaagccggttccggatggatttgagatagagcactctcgaaaaatg |
| | | ttgccagaagcataagtaaaattggaaaaaaatatcgatgcaggttattaaagatgaggcaacatgccatagtcaatcataacctg |
| | | cagatgtaatttgaaactgcatgttgagaattacggatttatttgtgtattcaccctcgcataaaaatgaagtagctttcatattc |
| | | cacactactgataccccctgaaaatatataactaaaaaaaacaattttaaaacatgaggtaggaatagcaatctgactgtgatgta |
| | | gttatttttttgatgaagataattaggtgctcgttgttc (SEQ ID NO: 16) |
| 19 | pLG021 | ccactacaccggtgaccatgatttattgatcgttcctccttagtgaaccgattctgcccgcttaaccttaccccctggggggtaga |
| | | tgtaagcaacggagttctgttcgccgccaggtcaaaccacgatgacttgatcggcaggacagggaccacaatagaccttcaggtcg |
| | | gaatcagggatagaaggggacatgggcgaccgacagatatgaagatatgatggctatggcggcatctctgcccaccctcaggtcca |
| | | aagcgaaaggaatcggaatgccccgtatcaacgttgagaaactgctgcttgagatcgaaatcgacaaggtggcagagcgattgggt |
| | | atggcgcttaggagcgaatcagctacgcgcaagctcacgctgtgcccgttccatgacgataaaactccttcccttctaattgatac |
| | | gagcagagataattctggacagcattaccactgctttgcctgcggtgaacatggagatgcaatcgatctggtgaagggagttcttc |
| | | atatcgatttcaaaggtgcattagagtggctgtcaccaaactctactaccacccctgtaaatagggcgagaaaacagaaggctatg |
| | | cagcctgagcagccagaaggctcagggcttgcgcaagcttataagttatacctgttaagcaatgacaagcaacgactagctaactg |
| | | ggtgactgatcgcaagcttgatatttttttgatggaagatgcaggattcatatacgcacacaaaaactcactatctaaacaggttt |
| | | cctcaagaaaagattttggaacgaagcgtgaattagcagcaacattggaagaagcgaacctaatacgcaaaatccttccaagctcg |
| | | gggttccaaaactactatttaaatctacagtcaatccacgacaacaactatatagactttttttcaggggatcgaatcgtattccc |
| | | gataagagacgatcagaaaaaactactaggccttgccgcccgggcggtagatgagcaaccagcaaaatacctattctcaaaaaact |
| | | ttccaaaatccaaagctatttttagaatagagcaagctacaaccactctacgagcattggctaagcgaggcgaaacagatctacgc |
| | | ttatatatctgcgaaggattttttgacgctctaagattggaaagcttgggatttcctgcagtagcagtaatgggaacatcaattag |
| | | caaagaacaaattaagattatgaaagggcttagcgacacgctcccttcaaagctagcctctttgacaatctgtatttgttttgatc |
| | | gcgatgaagcgggattaagaggagcatccgaggctgtactaaaattcttaggcgctaatctcgacgtggtatttgtatggcctact |
| | | actgctcagcttacaagcgcagaccattcaaacacaagcataaaagatcctgacgaatatttgagaaatttgtccgcgccgcaggc |
| | | caagtcacttatcgatgtttccacctatggacctgtagtagcagtactagcaaatcagtttggtgtgcatgccgacgaactgcttg |
| | | aaaatctaaagtggaacagtgccagtcgctctcgaaaatacaggtcatttgagaaaactcgtgctgaactcaggaaagttgtagcc |
| | | aacccccatctccaatcaagcgacctttttttaaatggccgaacagatcttgactcggcggctcaaatagaatggattgatttttt |
| | | aagtgtcgacattgcgactgaagccgctccatcggaatgttatcttaccaactcaggcaccagactaaaccacgcccgactgctcg |
| | | cctatatgggctcacgaagaggagagttgccctgcgaagaatcaaaatgggagcggttagatattgcggcaagtgcattcaatgtg |
| | | ttgctcgctgaacgattggctaatgaaatacatggacccatcgacccgttcgaggccgtatgggtgccgaggtccttcggcgcaga |
| | | agagccgagattaaaggtgatgcctcaacctgaggatttaatagcgcatcagtacttactaaatgagctacttacagaacgctggg |
| | | atgcttccgctctcggtgttacagcattcagccagtgcataccagctgtccgctattaccgcgaagaaagaaaaactgttacgaca |
| | | ggaatatctaccccctcagataacacccaacctattatacttgaacagacgctaagtttcgcctatcaaattgatatggaggttat |
| | | tgagggcaggcagccagcttcagatcagggaatgtttcgtccgttcctagactgctggcgagactttatgcagtcccttaaaaatc |
| | | aagccaaatctataaattacgtgcatgttatccgcctcgatgtcagtcgatattacgaccgcatccgcagacacgtcgtaagagac |
| | | agcattcaaccatttatacaacaagctctggaaactgtcgctgataatgcaccggcgtttgctgaactgatgaaaatacaagcatc |
| | | tgcggatgaagcagcggacaaatccgcaataattgtcgagcaattatgcgacatgctctttggctacccataccttagccctgata |
| | | acgggagaattaataaatcagatcccttacgcggtattcctcaaggcccagtaatctcagcatggttaggctcagtggctttgttt |
| | | ccagtagatctcgcggcactggaaatgatgaacaaatacaatgtagacggggaaactcatctagggtatgcaaggtatgtagatga |
| | | catagttttactagctagcagctccgtacttcttgaggaactgagagagctagttgatcaaaaaactcggagcttagacctggcgt |
| | | tggtcgcgaaagctgacgctattccgccaatgtctgctgaggaatttgcagattatgcaaatcaagggcgagctttagaagcatct |
| | | ggtccagcgtgggaaccaccgttggctggcgatggtgaagcggggtgggagttttggtcaggcactcccccctcagatagacaatc |
| | | tgccctgcaactgctatcaaattgggagatatacaaaagcccaatagaaataatcttgcaaacagtgaaaacgtccttcctagcta |
| | | tggatttacgttctagcgagcttgcaaagggagcaaggctaatatggtacgttgtagcatccgacctcctctcagctgacattgat |
| | | ccaagcgatgcggcagatttagcgtgggaaatttatgatcgctattggaaggaatgtactgaggagtgtgggtggcagttaaaccc |
| | | ggatagtttcggatgggaggcaccgaatctgttcgcacttgagggactggaaaagcttatagatcataaaaatagcctccaatcgg |
| | | gtttaactgctttagaaaataccgttcggcacaaacgcatctctttcctagctagaaccgtgcttggggagcggttcaaactgcat |
| | | gctcttgaaagcagctctacgcttaagcaccagatagataaaagactagatctcctcgaatggaaagcgtcaaaatcgtgcggaat |
| | | gcccgttcgtagaactaaatcctacgcagagcgatcaatgtatattcgctcctggcaacccttcaactggttccatgccgcagtag |
| | | aagatttcatgctcgcggatcagtccagcggatccgacccattgagttcatatgtcactcagttccaatctatagaaaagagcatc |
| | | agacctaatcacgccgcttcttatgagttcttccggtatttactgccatccgatggcagcgatagcgatcttgagtttttctcaaa |
| | | aacagagaatcgatactccggcttagcaattcagattttggttgcattagtccctcgggaaagcataatacagattctctcaaata |
| | | gagcgcgcttactttgtcctctagaagctggtaaaaaactattagtcatgccccctcttcctggcgtcaatcagcaacgtatagtt |
| | | gcttgccagatcgatagctcctcagaaaacaaaatcaaaaaaatcagctcgtttgagtgctatgaaatagattcaactaaaaccaa |
| | | taccacatctctagacttttttggtgcaaactctgcgggcgtagttgtgcttacacccacatggaacaccgaagcccaacctcaat |
| | | ccgccatacttcgatcaaactcagaagtcccgaaaaatcttttgttggaggtatttgagaaaccgtcaaccggtttcccttccgct |
| | | attcagggattgaagcacgtagcctcactatatagagccattgtggtaataatggctgaatacgagaggcaaaatgatggtttaga |
| | | gcttatacccgcttggccataccttgccacagatatgacctctgggaactgctacctaatttgtgagggcgtaacgaaaggagaag |
| | | taggaaaccgagcatttgtaagagacggtgggcgggccctaagaaccattgagataccgatatacgaagcccagttgtggcgagcc |
| | | ggggttgcgctaagcgattacataggcctgcacgacgatattgctaaatttagctcctccgaatccgaaatacctttggatgcgac |
| | | aacgcttgccgccccgtcacagtacgtgctacgaagccaacttcgtaaactgaggggtgcctttgctaactcacaaatagggcggc |
| | | gcgttatgcccccaagttttcttccggcaagtgttgaacgtgcgcttgagttattggagcattttccggaagactcagatagtaca |
| | | aagatgcagctaatgcatctgcttgccactgaaaccgaaactgcgggaatgcgcgtccgctatgagaaaaatattgaggtcacaga |
| | | gctcacggtatttctacgtgcggtcgccgacagggttctaacgaaactacccttaagcataggtgaggtcattgctgcaccgacta |
| | | cagcagtcagtggcctgaggagagacctgagtggggtcttgacccttgccagaagcatatggtcgatggatgaagaagaaaaactc |
| | | tctccaatttttgcgtggaagatttttcgagctggaattgtaggtattggtatcgctgttgctctacgggggattatagcttcact |
| | | aagaagccacggggggtttgcacgctttgagggatttgattttccagcggaatgggagcttccccctgccacagcagttttatccg |
| | | aaccggcgacaacagataaaaccactgatgaaaatgtaagcctcctcgaccatttccgggtactcgtatcacatctcggacaccga |
| | | atgaggttggacgacaacggcgagccacaaatcccagaagaaatcagcacagaaataagaaaatacgctacagcattagcgggcct |
| | | cactactaaagactcaactgcggtggacgcaagcgactggcctttctttgatatcagcgaaaaagtttttgataccctaaatatag |
| | | aattattagagaacgtcagcaatctaatcaaaaacttagattccgcgcttggtctccaggtaattttggttacgcaacaatcatac |
| | | ggcttcaatgctcaaaccaaacgcttcactgactcaagaggacttgcatgggatataaagccatggatgatctcgcaatacccatt |
| | | gcgtgctcgccacgttgaggagtgttttgatcaagaccgtagaatcgtacgtgtatggagcgagatttacgaaaaaaacagtcaac |
| | | gcctgctttctatatcagtactaggcgagcctttcgcatcaattgcactatgtaaggacttggaatcgccttatgccgagactaaa |
| | | aatgtagacagcaagcacaacactgtattaggtcctagcgagcagggttctgaaagcgcacccatagatatttcaccgattcttga |
| | | aactgctgagcctgaggccgagactgccttagcagacacacaattaataccaaccccaaaccaaactagcactgaagacagctttg |
| | | ataaaatagatactgagcgtaatacaacacacaataaaaaactaccgcttaccgacgcaacactcaacgcccgaaagaattcattt |
| | | agaaatagccagctaacagcctggagcgataggaagtccaataaaaaccctgcccatgttcgggtagctctatttcagtgggacca |
| | | agagctgagctatgcacaccctatggtggaggccaccccacaaaaatggcctttcagttccgtctgtaaaccagcagttttaaaag |
| | | aacttaaacgcctatataactctccctatcaagcccttttgaatgcaactgaatctgccggtcaacaccacctatggaaaaacgaa |
| | | aatatttccctacccagctggggtgagcttcgtcgtcggcgattattgctcaacgcagtgaacgcatgccagtcatttggcgtgga |
| | | cttattgatacttcctgaatactcagtccgtgcagaaactgttaagtggttaaaagaagagtgcttacccggaaagacggtagcgg |
| | | ttttagcaggaacatttttagctttcgactccggtccgccccccctaaaacaaagcgcgagcctcaacctcttgtggcccgtaccg |
| | | cgtgatattgccgaatgcctcaaaccgcttgcacccaaaacaaatgaagatgctatgtccttgagtgacaagattgacaagggcat |
| | | tgtattgcaatggggcagatcaaagaaataccgatcagtagctctaaatgagttcatccggcctggaactgatcctctcacccccc |
| | | tgttcatgcccggaaaaataatagatgaattgagacgtgcaaattgggatctggacgctgatggtgttgttaagttgctagccaac |
| | | acagagttgccacttgcgaatttcatggagctgatatgctctgagattttcctgttcacgagcccaaccaacattccagagatggc |
| | | aagagattatgtttcaatgtgtgcaagatttggcttcggcgctgcagaagctcaagtctgggcggatctcaaactactatctaaat |
| | | ggctttcggtctgttccaagcctggtggtgccgactctagacgatcaattttgatcgtacctgccgcgaccactcgtactgctgat |
| | | tattggatagcaggccaagctggcttgcttgccgccggcactacaactgtatttatcaatggcgtaggatctgggcttaagggtgg |
| | | cagttgttttattggcagagagagctggaaaacaggggctggttctcacggttacattgagaccattacgccataccatggctggt |
| | | caaaaggaatttactataatagcaaacatgacccactgagcgaaattgatcaagcattggtgatcgcagatatcgatcctcataac |
| | | atgcttgaaggcaaacctagacctcagatgctgccagttcccttacagctagtggcatacctaccaatcgttgaaactgtcgacga |
| | | aacaagcttggaccaaactctctgtgacgcagttcaggttgaccataacaatattgcaagaattaatcagggtcagcgattgggtg |
| | | gacgacttaaaagtcgaaatgagttctggcaacttatcacgcaaagtataaataatgatgtcgacaacgactttatcattaacttc |
| | | agtaaatactttactgatgggaaagcgattcttgagcgagcaaactctttcttcaacaatggacaccaacagcctttttcatcggt |
| | | agttaagctagacctgctctgctctccggcactttacgactggctagaggccgatatgacgttgcgggagggtgaggcgttaccca |
| | | acatctcagtcccttcatggaccaaataacttcggatagattacgagcccctaggataaagcctgtcgataggggctggtcacatt |
| | | ccccgcagcagggcggtgccgataatagctgctcacatagcttagagagcagtcaccgcttggcactttggagctgggagagcgtt |
| | | ggcatcgtagaatcgtcggcagtgaaaattcggtacagctacggtacggcacctagcttctgtcaactaattcaaactacactcaa |
| | | caccatatactacggtgcctccagctatgccaacctacgttcagctaagaacgacttcactaggcatacatggtcgcccagcaact |
| | | cataatcccttggtcgcaggttcgagtcctgctgggcccaccaagctttgagagccgcgctttgcgcggctttttttgtgaagcca |
| | | agcactcagtttggtccgaacaccacgccaaagtgtttttcaagatcgcacatcccagaccacacgatgcacagacttcatgttga |
| | | agcgccgtcttcagaaataagctgggaaaaggtcaatagctttcaatttgtagcagccaaccgtgatcacaggtagagcacgggtc |
| | | gatttgatcttgcaatcctttgggcagcaagacccttgggctgttcaccggcgttgctgcacaaccagccacgctggaatcattac |
| | | tgtcatcaaggttgagaa (SEQ ID NO: 17) |
| 20 | pLG108 | |
| 21 | pLG023 | atccctgaattccccgaaggtgaacaatccactgttcacccttcaccgtatattaacccgttatcacactgaaattaaaagagaaa |
| | | aatgaaaggtgaacagtgtgaacaatcaaatcaaaaaaactttctactcccactatagcctgactggtcgtctccaaaacgagcgg |
| | | aaaagcatcaacaatgaatagttaactgttaactccgcgccaactcattaccacttaactcaatgatattaaatggaaaactatcg |
| | | aaatgaatactctgcaaaattaaatgcaaaaaaatatatgccagtcaaatttcgttacgcactctcttccaagaaagagataaatg |
| | | ctttatacgtccaccatactatgttatttttttaatacggctctgccttaaatctgtgaggttgtttcgcctcgaagtatcttatg |
| | | ttagcacatcacgctaccaatcagcggttagttacttgacgtaactgttaattggctaaagtttgcatagagtgattgggcggagc |
| | | cgtaaatttagtccataaatacagtaacgaggtagagagtgtctttacatgacaagctactgatgcttagtctcaattcggcgaat |
| | | aaagaagaagatgagacaatcccggagttacctaagttagagcctcagccctatcaagctggaaataagttgaaatgggataataa |
| | | agagctgaaaaatcagcccatcacttcaaagaatgacattaatgtaatatgcaaaaaaattgaaaacaaaagcattgtaattacat |
| | | cagcaaacgatgtagccaatctgttagaagtcccggtcggacaattattatttattttatataataaaaaagataactatagaact |
| | | tttgaaataaaaaagaaaaatggaaaaagtagaatcataaatgcacctcaaggcggtttatcaattctgcaagagaaattaaagcc |
| | | agttcttgagtacttttatcgccccaaaaaaccagcacatggatttattaaggataaaagtatattaacaaatgcagaaaaacata |
| | | caaagaaaaaatatgttgttaatgtagatttagaaaattattttggttcagtcactttcgctagagtatatgggatatttaaaagt |
| | | aagccatttaatttctctcatcctgcggcgagtatattagctcaactatgtactaaggatggaaaattacctcaaggagcatgtac |
| | | ctcccctgttctagcaaatttagcatcagcctcactcgataaacacctaacccaactggcacgtagaaaaaacatcacatatacaa |
| | | gatatgcagatgatattactttttcatttaatcaacgacaagtcagagaaatcataacgctagataatgaaaataattttgaattg |
| | | ggcgaggcgattatctctgtgatagagaaaagtggcttcagcataaacacaagtaaattcagagttcagaaaagaaatgaacgtca |
| | | aaaagttactggtctagtggtaaatgaaaaagtaaatgttgagcgtaaatatcttagagttactcgttcattagttcataaatgga |
| | | gagaagacaagttaacatcagcattgttgtttgttactaaaaaaggttttaaggcaacaaataacgaacatgctatatcaattttt |
| | | cgcaatcatatttatgggcgattgagttttataaaaatgatccgtggtgaggacttcccgttatatcttaaattaatggctgaaat |
| | | gagtcatcatgatcctttaaaaacaaaagaagggcttagagcaatgaaagaaactgaaacttacgatgtatttatttgtcatgcaag |
| | | cgaagataaaacatccatcgcaattccaatttacgaagaattaattaaattaaatatatcaacattcatagatcatgttgaaataaa |
| | | ttggggcgattcattaatccaaaaaattaactcagctcttgtaaagtctaaatatgtaattgccattctttcggctaattctgtag |
| | | ataaacattggcctaagaaagaattgcattctgtgcttgcaagagaaatcactgaaggtgaagtaaaattacttactcttgtaaaa |
| | | gaagcagatgaagcaatagttgctgaatctttgccgctcttaagtgataagctttatatgacctataaagataatccggcagaagt |
| | | tgcagataaggttcgtgcgcttttaaacaagtgacagctactgtcaaatgtgtataaagtcattgatattttatataaaatcaatg |
| | | gattgcaatccatataagattccttatgcatcagtgacccggtgctcgcccggtcactgcttcagtcccagcagaactcagacgag |
| | | gcgcttaacatctaacgggatgccaacccgacgtttggttttatcggctatctagcctatatagaagca (SEQ ID NO: 18) |
| 22 | pLG024 | ctattgtgagcgagaaacgcgctactactatatatagacagacaagatgcacttactgaataaatactcataacggagaaaccagc |
| | | tgtatagtgaacaatagatttccagtagcatatttttacttcacttttagttattaatatgataatcataaactacggctctgcct |
| | | taaatttgtgaggttgtttcgcctcgaaggaactaatgttaggacatacgccaccgttcagtcgatggtaacgcttcttaactagt |
| | | ggtccgctaagtgatgcgcaaagtgattgggcagagccgaaacgtttacaatccgataggagttggttttgtcgctacatgataaa |
| | | ttattaatgcataacttcgcattagccaataaaaaaagccctgacttcatatctgaacttcctcaaattgaacctaaaccatacag |
| | | caatggacataaaattaaatggataaaccacacacttactagcactgaagttactccccctgataacctgattaaaatatgcatat |
| | | tgattgagtcaggggaaattgctataacatcagtaagtgatattgccaatttacttggagttcctgctggccaattactttatata |
| | | ctatatcgtaaaaaagataattatcgtacttttgaaatagaaaagaagaatggtaaaaaaagagtcattaatgctccttgtggcgg |
| | | tctatcgatactccaaacgagactaaagcccgttcttgaatatttctacaggccaaagaaatctgctcatggttttataaaaggaa |
| | | agagcatcattactaatgctgggatgcatattaaaaaaaattttgtcgtaaacattgatctagaaaactatttcgaatcaataagt |
| | | tttgctagggtttatggaatatttaaaagtaaaccttttaattttgctcatcctgcagctactgttttagctcagttatgtactca |
| | | caatggaaaattacctcaaggtgcgtgtacatcgccaatattagcaaatattgcatcagcttctctagacaaacagctcacccaat |
| | | ttgcaggaagaaaaaaaatatcttattctaggtatgctgacgacataactttttctttcaatcagagaaatattgatataatcaaa |
| | | aaaaacgacgacggaagttatagtcttagtgaaactatagacaatattatttcaaaaaatggctttaaaataaattatgataaatt |
| | | tagagttcaaaccagaaatacaagacaaagtgttactggcttagtggttaatgataaagttaacattaacagaagatatataagaa |
| | | ttacacgttcaatgattcatagatggacagatgataagctaaagtatgcacttctctttgctacagaaaaaggatatcaggcaaag |
| | | gataataaccacgcaattcaaattttccgaaatcatatttatggaaggcttagctttataaaaatggttagagggaaagactatcc |
| | | aggatatttaaaactgatgtcatacatgagtcataacgatccattaaaaacccaagaaggattgcgagcaatgaaagaaacagaaa |
| | | actttgatgtttttatatgccatgcaagcgaagacaaaaaagacattgcaattccaatatatgacgagttaactaaacttaaaatt |
| | | tcagccttcatagatcatgttgagataaaatggggcgactccttaattgataaaataaatgcagcactagttaaatcaaaatatgt |
| | | catcgctattttatctgctaattcagtcaataaggaatggcctcaaaaagaattaagagcagttttagccagcgaaatatcgagtg |
| | | gcgacgtaaaacttttgaccttattaaaaaaagaagacgaggaggtcgtaaacctatcattacctttacttagtgataagttttat |
| | | atggtctatgataataatcctgaagtagtcgccaacaatattaaatcactcttacaacgataattctctcacaaaagaaaatgtgc |
| | | agattgatgcgtattaagtattaatctgcacatacaaaaaaaataataaaataatacatttttcataacttgtaggtaacaacaat |
| | | atatgtcgtaacgaatatttggataacctctataccctattaaccaaccaattaactctatgtaatctcgcagcc |
| | | (SEQ ID NO: 19) |
| 23 | pLG025 | cacgtaaatatgaaaactgttagcccacatagcccaacaaaaatatttgatagttaaccttctgttactaaagaaaacaggaaagt |
| | | aaaagtgggctaaagcttatgcgccctcgatgttgggctagccccaaaaacggtaaatttagcttaagtgcataattggttagctc |
| | | aaaagcattatttttcatttaaataaattagttaattggtcttgtttagatgattcaactgggctgactactttctttgtatatac |
| | | tccggataaattttcccagctaacttgcctaatcatcactctgatgccagaaatgaacagaacgcaaaccatctataacttattga |
| | | ggattttgaaaaaaattgattgggggcttgagttatatgatgactatgctaatttaatacggcacatgcaggtagatttgttggtt |
| | | gtggtatcgcaatcagtgttaacaaggtcgggagtattcgccctctgactgccgtcaagtcatcttggcgtcaccgttaaatgcgt |
| | | aagagtacctgcatgtgcattaacataatcaataatggaatttactgttatgtttaaacctacctatctggcaaggctgcaggctt |
| | | gttgtaacaaatttgaactggctgatttgcttcagattaaagttacatttctgactaatgttttgtatagaataaggccagaaaat |
| | | caatacaaaaaatttactataaagaaaaagtctggaggagagcgggagatctttgctcctgatgaaaaactgaaagatattcaaca |
| | | acgactttctgaacttctatatatatgccaggaagaaatttgggcaaaaaataatattaaacaaaatgtatcacatggttttgaga |
| | | agaataaaactataattacaaatgctgagaggcatcgagataaaaatattgtatttaatattgatattgagaatttcttcccatcc |
| | | tttaattttggtcgcgtgcgaggatattttattgcaaaccaaaatttcaagttacatccaaatgttgcaaccattattgcgcagat |
| | | agcctgcctggatggatcgcttccgcaaggaagcccttgttctccagtaataactaatcttatttgtaggattttagatttcagat |
| | | tatcaaagctagcagtcacatatggttgtagttacagccgctatgcagatgacattacgttttcaacaaacaaaaaaaacatccct |
| | | gatgcattagtttctaatgagaaagaaaacgaaccaggtaagatattggtagaagaaattcatcgtgcaggcttcactttaaacca |
| | | taataaaaacagagtgtctaggtgtacatcaagacagcaagttacaggtttaactgtaaataaaaaaataaatgtaagcagagagt |
| | | atataaagaatacaagagcgatggcgcattctttatactttgaaggttcgtatacacttattgagaaagatggaaaacatagaaag |
| | | ggcacccttagtgaattagaagggcgatttgcatttatcgatatgcttgataaatataataatgtggaagcaaagaaaaatgcgcg |
| | | tcctgagagatatgtggttaaaggatttgggttggattttaagcagagacttaactccagagagaaagcatacagcaaattcctat |
| | | actataaaaatttctatggaaatgagcaaataacaatcttaacagaagggaaaactgacccggtttatcttaagtgtgcaattgat |
| | | tctttgtttttggattaccctcagttagttagagaggaaaaaaacacaaagaatagagtgttaaaagttaatttatttaaaaccaa |
| | | tgacaagaaaaaatattttctcgatttgtctggtggagctgcagactattcgaggtttttcagacgacatggtttactttgtaaag |
| | | cgtatgaaaaacagcctcctaaaaatccagtgataattttattagataatgacacagggccatctgacttcataaatcaaataata |
| | | aaggattattcgcatctaccaaaaaaagcggaggatgttagaaaaggggcgttttatcacttagagagtaatttatatgttctttt |
| | | tactccgttattaccaggggataactattcttcactagaggatttttttgaaccaaaagttttgcaaatgaagtataatggaaaaa |
| | | gcttcgataaaagcaataatcatgacagttctactacatttggaaaagatagatttgctacttatatagtaagggaaaatagaaaa |
| | | actatcgatttttcattattcaaacccatacttgattcaattattgaaatcaaaaaacattttatcaatctacacccatcaaagtg |
| | | atggttatgaaaagagataaaaatgctgatgtcaaaagaggcttatgctcggcacagtggagtgagctgccaaactgtcgatgact |
| | | gggtagccggtggggcggaagtagttatgtcccgtagcaaggttaagatttgctcttgtgtgtggggaaccttagtcaattacttt |
| | | cctggcgcactgtgttagattttgtaaaattttaaaagactaaagatttaatatcacttctccatggaggttgtg |
| | | (SEQ ID NO: 20) |
| 24 | pLG026 | ctatacgccgttatagctgaattttccggtgatttcagggcacattaaccaatttagataatactatagtaatggttgggctgatt |
| | | tttcaagaacaaaagtaattttcaagctttgtaacatgttgattttccgcttttcgctcaagcgagctttcatctttgcaagccca |
| | | tatgttcgtttttcaagcgattattcagatacgttaacttcccatggcagtgcatgactatgctgcatgaaatcgcatgatcgatc |
| | | gaggatcgtctatgcttagaccagccagaaatggcgggcttttgctcatgtcatgcagctgcatgaaaaccactgcataaagtggg |
| | | caggcgtggcggggatacgagggcgcgctatcacgtaaaataggcaaaatacttctggaaaacagaaagttgaagtgatatgttca |
| | | taaacacgcatgtaggcagatttgttggttgtgaatcgcaaccagtggccttaatggcaggaggaatcgcctccctaaaatccttg |
| | | attcagagctatacggcaggtgtgctgtgcgaaggagtgcctgcatgcgtttctccttggccttttttcctctgggatgaagaaga |
| | | aatgacaaaaacatctaaacttgacgcacttagggctgctacttcacgtgaagacttggctaaaattttagatgttaagttggtat |
| | | ttttaactaacgttctatatagaatcggctcggataatcaatacactcaatttacaataccgaagaaaggaaaaggggtaaggact |
| | | atttctgcacctacagaccggttgaaggacatccaacgaagaatatgtgacttactttctgattgtagagatgagatctttgctat |
| | | aaggaaaattagtaacaactattcctttggttttgagaggggaaaatcaataatcctaaatgcttataagcatagaggcaaacaaa |
| | | taatattaaatatagatcttaaggatttttttgaaagctttaatttcggacgagttagaggatattttctttccaatcaggatttt |
| | | ttattaaatcctgtggtggcaacgacacttgcaaaagctgcatgctataatggaaccctcccccagggaagtccatgttctcctat |
| | | tatctcaaatctaatttgcaatattatggatatgagattagctaaactggctaaaaaatatggatgtacttatagcagatatgctg |
| | | atgatataacaatttctacaaataaaaatacatttccgttagaaatggctactgtgcaacctgaaggggttgttttgggaaaagtt |
| | | ttggtaaaagaaatagaaaactctggattcgaaataaatgattcaaagactaggcttacgtataagacatcaaggcaagaagtaac |
| | | gggacttacagttaacagaatcgttaatattgatagatgttattataaaaaaactcgggcgttggcacatgctttgtatcgtacag |
| | | gtgaatataaagtgccagatgaaaatggtgttttagtttcaggaggtctggataaacttgaggggatgtttggttttattgatcaa |
| | | gttgataagtttaacaatataaagaaaaaactgaacaagcaacctgatagatatgtattgactaatgcgactttgcatggttttaa |
| | | attaaagttgaatgcgcgagaaaaagcatatagtaaatttatttactataaattttttcatggcaacacctgtcctacgataatta |
| | | cagaagggaagactgatcggatatatttgaaggctgctttgcattctttggagacatcatatcctgagttgtttagagaaaaaaca |
| | | gatagtaaaaagaaagaaataaatcttaatatatttaaatctaatgaaaagaccaaatattttttagatctttctgggggaactgc |
| | | agatctgaaaaaatttgtagagcgttataaaaataattatgcttcttattatggttctgttccaaaacagccagtgattatggttc |
| | | ttgataatgatacaggtccaagcgatttacttaattttctgcgcaataaagttaaaagctgcccagacgatgtaactgaaatgaga |
| | | aagatgaaatatattcatgttttctataatttatatatagttctcacaccattgagtccttccggcgaacaaacttcaatggagga |
| | | tcttttccctaaagatattttagatatcaagattgatggtaagaaattcaacaaaaataatgatggagactcaaaaacggaatatg |
| | | ggaagcatattttttccatgagggttgttagagataaaaagcggaaaatagattttaaggcattttgttgtatttttgatgctata |
| | | aaagatataaaggaacattataaattaatgttaaatagctaatgaacagccctaacgttatgaacgctaaggctgatttttcg |
| | | (SEQ ID NO: 21) |
| 25 | pLG027 | aattccccgaaaatccgcccgtttttactgaaaaaagccatgcatcgataaggtgcatggctttgcatgcgttttcctgcctcatt |
| | | ttctgcagaccgcgccattcccggcgcggcctgagcgtgtcagtgcaactgcattaaaactgccccgcaaagcgggcgggcgaggc |
| | | ggggaaagcactgcgcgcaagctatgtgaggtgatgtgtaatacatatcacgaatagcgtaggtagctgttggctttgcctgatca |
| | | aggtgacagtatacatatcttaaaatataaatatttatgattatttatttgaaagaggttgaataatgatttttgatgaaaaaaga |
| | | catttatatgaagctctgctgcggcataattattttccgaatcagaaggggacgatttcagaaatcccaccatgtttttcttcaag |
| | | aacttttacaccagaaatttgtgaattaatagtttctaatgagccggggaaaagaaaattacatggatacgattgtgtcgaatact |
| | | catcgactaggtataataactttcccagagtattatccttaattcacccaagagcatatgcacagttagcaaagcatttgtatgag |
| | | tcttgggatgagattcgaaaaatcaaagaaaataaaaacagtatgattaaacctgaaatgcatcctgacggtagactttttatcat |
| | | gaattatgaggatgcagaaacaagaactgtaagggagttaaacgatggatttggaagacgatttaaagttaaaactgatatcgcag |
| | | gatgttttaacaatatatattcacactcaattccttgggctgttgtcggtgtgaataaggcaaagacatcaatgaataagcataaa |
| | | aatagccaagatgttcattggagtgatagattggattattatcaaagacaaacaagacgaggcgaaactcatggtgtccctgttgg |
| | | acctgcaacgtcaagtattgtatgtgagataatattaagttccatagataatattcttgagaataaaggattcttattcagacgtt |
| | | acattgatgattatacatgttattgtaaaactcatgatgaagcgaaagagtttctccatgttttaggtactgaactttctaagtta |
| | | aagttatctctaaatttgcataaaactaaaattaccagtcttcccagtacattgaatgatgattgggtgtcgttgcttagtattaa |
| | | ctctccatccaggagagtattcaggaataatgactcggatatattatctgcatctgaggttataagctttttggattatgcggtac |
| | | aacttcatctgacgaatgggggcggtagtatattaaagtatgctatatctttaattattaataaagtagatgaggcgtcagcaaga |
| | | gagatgtacgactacgttttaaatctgagttggcactatcctatattaattccatatttagatgtattgcatccaaagattaacat |
| | | taatgatgaggtcaggttaaaacttaatgaggttttgaattcctgcatagataataagttttctgatggcatggcttgggtgttgt |
| | | attattgcttaaaatattccattgatattgacagttgtctcattagtaagatttttgaaaacggtgattgcctaagtatttgtatt |
| | | ttggataaaactggaagatatgataaggaaatagaagaattttctaaaaatataatttcattggattatttgtatgaggttgataa |
| | | atattggatattgttttatcagcgattctattcagggaaaggatataatccttacaatgatgattgttgtttcgatataatgaaaa |
| | | catatggagttaattttatgcctgatgatggttatcaaacgaaagctgaacactattgtaatatagtaaatagtccatttcttgag |
| | | aatgatgaacaagtaataagttttaacgattattgttcataatttataattagcctccg (SEQ ID NO: 22) |
| 26 | pLG028 | cctgtcaaaaaatccccgtaaatcccgctatttttaacgaaataagccatgcatccataaggtgcatggttttgcatgcgttttcc |
| | | cgttcctgtactcccgaccagcgtcagtcccggcgcgacctgaggtcacctttgcacctgcattaaaagcggccccttaagcgggc |
| | | aggcgtggcggggagagcattgcgcgccaaagcgtattgatatactgccagcattttttgatactcacacccatctacaggagtag |
| | | gtcactaccgatgtagagcttttccggattcagataaaaccacttagcatcggagcaaagtaactcaataccgaacaataaatatg |
| | | agcccttcgtgaaaccgggtaaggtcaaactcataaaccaacaaaaggggaaaagtgggatatgtgaggcgtgtatgatttttatt |
| | | tattgggcttcgttaaaaatggtgatttaatagccctttaaatttatcactttttaactaactccgagggtttatggttatttttg |
| | | atgaaaaacggcatttgtatgaagccttactgaggcacaattatttccctaaccaaaaaggttcaataagtgaaatacctccgtgc |
| | | ttttcttccagaacattcacaccggaaatagcagagctaatttcatctgatacatcagggcgcaggagtctacaaggttatgattg |
| | | cgtggaatattacgccaccagatataataacttcccaagaacgctgtcaatcatccatccaaaagcgtactcaaagctagccaagc |
| | | atatacatgataactgggaggaaatacggtttataaaagaaaatgaaaacagcatgatcaaaccagacatgcatgctgacggtcgc |
| | | atcataatcatgaattatgaggacgcagaaactaaaaccataagagagctaaatgatggttttggacggcgatttaaagttaacgc |
| | | agatatatcaggctgctttacaaatatctactcacactctatcccgtgggcagttataggggttaataatgcaaaaatagccttaa |
| | | atactaaagtaaaaaaccaggataaacattggagcgacaaacttgactactttcagcgtcaagctaaaagaaatgaaacacatggt |
| | | gttcctattggtcctgcaacctcaagcattgtttgtgagattattttaagtgctgtggataagcgtcttagggatgatggattttta |
| | | tttagacgttatatagatgattacacatgctattgcaaaacacacgatgatgctaaggagtttttacatttactcggtatggagttg |
| | | tctaagtataagttatcactgaacttacataaaactaaaataactaatctcccaggaactttgaatgataactgggtttctttgct |
| | | taatgtaaattcaccaacaaaaaaacgttttacagatcaggatttaaacaagctaagttcttctgaagtaattaatttcctagatt |
| | | acgctgtacaattgaacactcaggttggtggtggaagcatactaaaatatgctatttccttggttataaataatttagatgagtat |
| | | acaatcactcaggtgtatgactaccttctaaacttatcatggcattatccaatgctcatcccatatctaggcgtacttatcgaaca |
| | | tgtctatttagatgatggtgatgaatataaaaataaattcaatgaaattttgagtatgtgtgcagagaataaatgttctgacggca |
| | | tggcctggactctttatttttgcatcaagaataacattgatattgatgatgatgttatagaaaagattatatgtttcggcgactgc |
| | | ttgagcttatgcttgctagatagctcagatatatatgaagaaaaaattaataattttgttagcgatatcatcaaactagattatga |
| | | atatgacattgacagatattggctccttttttatcagcggttctttaaagataaagccccaagcccttataatgacaaatgctttg |
| | | atattatgaaaggttatggcgttgactttatgccagatgaaaattacaaaactaaagctgagtcatattgtcatgtcgtcaataac |
| | | ccatttctagaagacggagatgagattgtaagctttaatgattatatggcgatagcgtagcttttaggcctcatt |
| | | (SEQ ID NO: 23) |
| 27 | pLG029 | gcgttgaatggtataactatggcacggttaccgcatgttttgagctgtaatcgaagttatgaaaattgctatataaagcggtcgct |
| | | gttgtggagatacgattgcgggaagtgatggaaagagctataaaaagtacagaggatagtttaatgagggtattatgaaccgtcag |
| | | ccgtttacttcagcagcacttaaacgaaacttaagtgaaagtgagaaggcttattattttaaaaaaaataatgttgctgagttaga |
| | | atcattaattagtgatgccgttttaattgctaatgagaattttcgctctggtgtgagtgtaaagaaactaaatattaagggacgct |
| | | gcgtttacactgcttcatgtttgaaggaaaaaataatacttagacattgcaatgcaaatttaaaatgccttgaatcgcttcgtccc |
| | | aaacaacgaaatacaataattagtgagcttaaaatttatttggaagaaggtactccattcaaaatatatcgtttggatataaagtc |
| | | tttctttgaatcaattgatttaccgcagctttttcagctcttacataacgaaacacgactgtctagacatacaaaaaatttgctag |
| | | aatggtatcttaaatcgtgtgaaaggcttcactcttcgaaaggattacctagagggttagaaattagtcctatgttatcagaattg |
| | | tacttggcacaatttgataatagtattcataggcatccagaagtattttattattcaagatttgtagatgatatggtaatcgtttc |
| | | aagtggttgtgaatgtgaagcgtcctttatggaatttatacaagatgtattaccaaagggattggcwaaataaaaataaattaaaa |
| | | atatctccatgcataccaaagagaagtaagggtttaaataaacaggataaattgcttcatgaatttgactttctagggtactcgtt |
| | | ttctataatagacacacctttgagcaaagatggtgagattaatagctgttacagaaaggttgttgttaatttatctaaatctcgcc |
| | | tgaagaaaattaaaacaagaatagctaggtctttctactcttatcatattaatggtgattttaaactattgctagacaggatttct |
| | | tttttgactagtaacagggatttaaatcgcaaaataaaatcgttaagttctttagaaaaaagcaagataagtacaggtatttatta |
| | | cagtaatgcgaagttagatgttgactccatatccctaaaaaaattagatgactttttgctatattgtgtgcaatctaatactgggc |
| | | gtttgaatagtgttgcaaaaaaaccttttaatttgaagcaaaaaaaagaactgctaagaaatagttttagaaaaggctttgtggat |
| | | agagtatatagaaagtataactttaagcgctatactgagattacaaaaatatggttataaagaaaaacattaaacttgataagaaa |
| | | gattatctcagggctttactatgtgatacactgcccggtgattgtccaattattttttcaaatgatggcttatatataaacttaac |
| | | agaatatgatagagtttgtaatgatttgttacattttactccggtttcttctttcttaaaaaaaatagttaaccctaatttagact |
| | | cttctattagtgtcgcagatcgccaccgagaaaagaagaaacaaagctccccatttggctattgtatagtaaaagatgcctttagc |
| | | caaagacatctttctttaattcacccaagatctcaaattaattattcggaattttataaaacatactcatccgttatcacattaaa |
| | | tactttaaaaagtaatttttctattcgctacccacgtaaggtcgctaactctttctttttatatgaaaataatgctttggaaaaat |
| | | ataaaggggaagatatcgaaacaacaaaggatgagttaatgaggaaatattcatcctcttattttagttatggcggtttcaacagg |
| | | atatataaactatttcaaagtaagatgtttattgagcttgagaaaagattctcggtgatgtggatgttagatgtatcacattgttt |
| | | tgatagcatatatacgcattcggtttcttgggcattaaaaaataaatcatatatcaaaaaacatgttaaacacagcaatcaatttg |
| | | gacaagaattagatacactgatgcaacgtagcaataataatgaaacaaatggaatacctattggttcagagtttagcagggttttt |
| | | gcagaattaatatttcagcgaattgattgcaatattgagtcatgccttcttagtgaacatggatgggttaataataaagattatgt |
| | | tatattgagatatgtagatgattttattgttttttgtaatggtgagtcaagtgccgaagttattacaaaaataattaatgtgaagt |
| | | taaatgaatataatctacaattaaatgtaaacaagcttaagaagtattctaggccattttgcactagcaagacaagtttgattgtc |
| | | aaagttaatgaattaattcgcaatttagaaattaaactgtatgaaaaacgtgatagtggctttactttaaataaaataagaagtaa |
| | | gcatgatttaaagatatatgtaattaatcatgtcaagtctatatgcattgaaaatcaagtgtcttattctgatgtttcatcatata |
| | | taatatcatctctttccaaaagattaatatcaataattgatatattacgagttcaagaaaatgaagatgatgtagatgtaaaaaaa |
| | | aggattaaggacttaattttcacaataaccgatattatgttgttctttttcagtgttaacccaactgtttcatcatcttataaatt |
| | | atcaaagacaatggttgttgttaataactatttgaatgaaatatctagtgactatagtagtatttttatgactacgttagtgaatg |
| | | ctgcggaaaacattaattttggtgagaatgataatgggctgtttattgatgatttcatttcaattgaaaaggttaatttaatcttg |
| | | gctgctactttttttggagataattatcttataagtgacagtttttttcatggagttatacataaaaagaaattggactactttac |
| | | tataatctcactgctattctattttagaaacagaagatcattccgaaaattgaagtgtataatagagggtgaaataaaggaaatat |
| | | taagttctaatatggatttgctgcaatcatcggaaaaggcacatttatttttggatgtcatgtcatgtccatttgtctcaatagag |
| | | acaaggcgttttttatatagaaaatatctcaagagctatgagccaaagctgaacagaagtcatctggagattgagaatgatttgca |
| | | atctctgcttcaaacatattggtttgtcaagtgggatgagttagatattgtgaaaatgattgagaaaaaagaattgaaagaaagct |
| | | attaatttgataaatatgagtcgtggtcagtttcaaaatacttacgtcatcgtcgtcggtgtattttatatcgattatgaagacga |
| | | tttcgctggaactgaaatcggcttgaatgcttaaacttaagctaaaaaaacagtttgagaccaaagcctaaattattaggctttgg |
| | | attttcaggttcagttgagagtaattgctgtctg (SEQ ID NO: 24) |
| 28 | pLG030 | cttgagtttgcgtaagataatttcgtgaaaattaaagcaattaatataaaaaatgtaattactagtgtgtacagatatgaaaaatg |
| | | atagttataaaaccatatgaaaattgaagaaagagttcaatttttgccttgtcagtaacaaataggtagcttattgaaaaaagata |
| | | aaaaattaacaaaaaatcaataaattcatatagaataaaaatattaaagaaatgaaataagtgtttgcttcatcagttttagggat |
| | | acattaaagtggttgataaagaaaaatattatactggattaataaaagatataaaaatagtagcttatgcaagattcaataaaata |
| | | cgtcgtttaaagagaaataattttttaggattgttatctatttcggtagtttctatcttagttattatattatcaattgtagaaaa |
| | | aatttataatataaaaacaatgagtttaattccattgtttgaaccaaatatagaaatatggttcttttgtatacttgcttcaataa |
| | | ttattctttgtatatctattgcactctctactatgaagattgatattgaaatagaaaggttaaataaaagtgcagttgaacttaat |
| | | gaagtaaggcggaaaattgaatttaatattgagaatagtaattatcaaaatagtacattgtttgataaatatcttgaaataataaa |
| | | gtcagacttaataaatcatgatgaggttgattataaaataaataagtatttagtcagtaaagttggtagtaagtttgcttattatc |
| | | gaatgtattttattgatcagaattttacatcaatattttatctttttataacatttttaagcttttcttcaattatttcaattatt |
| | | ttgcaggtaatgttgaagtgataagacaagattttagtgtaaattccctgttgagaatcacaactaaaaatgaaattgttaaattt |
| | | aacttgggtcgtaataaggaagagtatgctattgcattatctcaagtttctaattatctattagagggcaatgaaataatagataa |
| | | tttaagctgtagaatagaaagaaataaagttatatttagtactaattcaattaatactttttatgctttaaaaaaaatttctaaag |
| | | atttaagccgattgtataaaattgagcctcctaatagagatgatatttctgaacaaatttatagaatttttgaacactctacaagc |
| | | tatagtattgtaaggttagacattaaaagtttttatgaaaatattcaatataatgaggtaattaaaaagctggatagagataaaat |
| | | actagttgcaaaatctattaaaattcttaaggatttatataactttattgataatggtttaccacgaggtttatctataagtccta |
| | | ttttgtcagaaatatttatgaaagaagtcgatcaacaaattagaaatatagatcatgtatactattatgctagatatgttgatgac |
| | | ataatagtaatttcaacagataagagtgattctatatatgaaaaaacaattaaagttttagagaaatatgatttaaatgttaatag |
| | | taagagatatataaaaaatattcctgctgtgaacaataatgaaatctcaactttatataagtttgattacttaggatataagtata |
| | | ttatagatacaatttcatataaaaataaacgaatagttaaagcggaactgtcagatgataaaaaaagaaaaattaaaactagaata |
| | | atacatagtcttttagatagagtttataatacaacgcattatgatcgggaggagttgttaattaagcgattaaaagtgttatcctc |
| | | taactactcaataacatataatgaattgtcaaaaactaatttaaaagctggtatgttttatagtcataggttagtaaataattatg |
| | | gtatttttagtgaatttaataaatttttatctaaagctatctactgtcaacaaaacaatttctttggtaaagctatgtcgcagatt |
| | | cctagtaaagaaaaagaaaatattattaaaagtatttgttttgttagtggatttaaagataaaaactttattgagttagagagggt |
| | | tgaaatggaacgagtaaaaaagtgttggaaaaataaacgatataagaagctttgaggtaaaaatgaaaagtaagatttatttagat |
| | | aaaaaggatttttatagagtattgttaactgatgtattaccctatgaagtaccttttattttaagtaatgaaggtttttatagaaa |
| | | cttaaaaagcaactcatttcattcagttactaaaaaaatattagaattaactttatttacttcacaagtaaacactaatcctttta |
| | | attttaaaatctctaaagatgatagtaattttaggaagttatatttagttcacccaagttcacaaataaaaatatcaaatttatat |
| | | aaaaattattatcaattaattacgcatttgtgtagtagaagttctttttcacttagatatccaacttatgttgcaaaagcttttta |
| | | tagtatagaaagagatagatctaattccgaaaattataaagatgaagatattgaattactgtcacaaaaaagccctaaatatgcaa |
| | | gtacttattttgtatataaagatatcagttttttatataaattctatgattcttatagatttcaccgtattgaaaaaaagtttaat |
| | | aaactattaaagtttgatattgctaaatgttttgactcaatatcaacatttcaattacctagatcagttaataaaaattgtagctt |
| | | tgaaagtcatacagatatacatagttttgaacatttattttcttcaattatgaaaggtgcttatcatggtaatacacatggtattg |
| | | taataggaccagagttttctagaattttcgctgaaattttattgcaatctatagatgtagcaataaaaaataagttaagaaatgaa |
| | | atgggaattaaggagggtgttgattatgttataaaaagatatgtagatgattattttttattttataataatgagcaaacttcaaa |
| | | tttaatttttgaatgtattgttgaagaactttctaagtatagactattttgcaatgaatcaaaaagtattaggactactattcctt |
| | | ttattacaggtattactattgctaaacatgaaataaggaagagattagaaactttttttgaattatttgagtcaataaataataaa |
| | | gatgattatattgggctaaaattaaatcattattataaaatatcaaatcaattaattagtgatattaagtgtattgtttttaataa |
| | | taatgtaagttattcaagtatttctggttatttttttactttaatgaaaaatcatgttttgcatataaaaaatagtttttcttttg |
| | | aggataaatctaaagttgaaaatttaagtaagttatttcttattattcttgatgtttcgttttttgtttactgtatgaattttaaa |
| | | gttagaagcacatatttaatttctcaaattatagttttgattagtactattgctgaatcatttgatttaaatttgatagatttaat |
| | | taataaaaaaatatatgatgaggtggatttggttttaaagataaagtcaaattcaaacttattgaataatattgaaattttaaatc |
| | | tattaattgctgttagagatattgatcttaattatcagatcttagtagatgatcttatgttattgttttcttcagaaaggattaat |
| | | aagtataattatttctctttaatgacttttttattttatgttcaaaggaaaaaacagtatcagcctatcagagatagaatttatgc |
| | | aataataattcaaaaatttaatcagaataatctaaatgtctcaaatgattctgagttaattcacattttttttgactcacttagct |
| | | gtccttatttaactaaaaatcaaaaaattaatataactaactctgcattaaattctattattaaattaaatgataatgaaattgat |
| | | gtttttgtagaagaaatgagcaaaactaattggtttattgactggaacttgcaaacaaaagatgcaattcagcgtttgctgatgaa |
| | | aaaagaattgaaatcaccctatgaaaattgagataattaagctagaaactagatatacctccgacatttgttggttgattttacac |
| | | actatataactcctagtttctataaaaggatgtttctaacatccttttattttttttgagatttaatttttcttttagtgacaact |
| | | aagttttactataactaatagc (SEQ ID NO: 25) |
| 29 | pLG031 | actgctcgacaaaacgaaccgttcattcgcgaggatggtggcagtgaatgaggtggtcagttttatcagcgcttcaaggtagcttt |
| | | ataggatggattgtagcgaagtgcccaacaaattgattgaagctaagggcattgagcattgcatgcatcatgctcagactgacaaa |
| | | aaatcaaaataaatggattgatacggacatgacagacagcgtacagactgaaactaccgagggaaaaatcatcatcaacttgtttg |
| | | ctcccaatcttcccggaagtaccaaagaagatgatctcattcagaaatctctgcgtgaccagttggttgagagtatccgaaactcg |
| | | attgcttatcctgacaccgataagtttgctgggctaacacggtttattgatgagtccggccgtaatgtattttttgtggatggtac |
| | | tcgcggtgcgggtaaaactacttttatcaatagcgtggtcaaatctctgaacagtgatcaagatgatgtcaaagtcaacatcaagt |
| | | gtttgccgaccatcgaccccaccaagttgccgcgtcatgagccaattttggtcactgtgactgcccgtctgaataaaatggtgtcc |
| | | gacaaattaaaaggatactgggcgtcgaatgactatagaaaacaaaaagaacaatggcagaatcatcttgcacaacttcagcgtgg |
| | | tttacatctgctgacagacaaggaatataagccggaatatttcagtgacgctttgaaactggatgcccagcttgattactccattg |
| | | gtggtcaggatttgtcagaaatctttgaggagctggttaaacgcgcgtgtgaaattctcgactgcaaagccattttgattactttt |
| | | gatgatattgatactcagtttgacgcgggttgggatgtacttgaatctattcgtaaattctttaacagccggaaattggtggtggt |
| | | agcgacaggtgacttgcgtctatattcccaattgattcgcggtaaacaatacgaaaattacagcaaaactttgctcgaacaggaaa |
| | | aagagagcgtccgcttagcagagcgaggctatatggttgaacaccttgaacagcaatatttattaaaactttttccggtacaaaaa |
| | | cgtattcaattgaaaacaatgttgcaattggtcggcgaaaagggaaaagccggtaaagaggagatcaaggttaaaaccgagccagg |
| | | catgcaggatattgacgccatagatgttcggcaagcaattggcgatgctgttagggaaggccttaatttgagagagggatcagatg |
| | | ctgacatgtatgtaaatgaactgctgaagcagccagtgcggttgttgatgcaggtgcttcaggatttctatacaaaaaaatatcat |
| | | gccacatcggtaaagcttgatggtaaacaaagcagaaatgaaaggcctaatgagttatcagttccgaatttacttagaaatgcctt |
| | | atatggctcgatgctaagcagcatttatcgtgcagggttaaattatgaacagcatcgatttggtatggattcgctctgtaaggaca |
| | | tttttacctatgtaaagcaggatcgtgattttaacactgggttttatttacggcctcagtcagaaagcgaagcattaagaaattgc |
| | | tctatttacttagcgtctcaggtgagtgaaaactgtcagggcagtctgtcaaagttcctacagatgcttttggttggttgtggctc |
| | | tgtcagcatattcaaccaatttgtgaccgagttagcacgagctgaaaatgatagagaaaaattcgaacagcttattagtgagtatg |
| | | tagcttatatgtctgttggcagaattgaaagtgcctcacattgggctaatcgatgttgtgcggtggttgcaaacagccctaatgat |
| | | gagaaaattggtgtttttcttggcatggtgcaattaaatcgtaaatcacgacaacacatgcctgggggttacaaaaaatttaacat |
| | | tgatactgagaatggcctagcaaaagccgcaatggcgtcttccttgagtacggtagcttcaaataatcttatggatttctgtagtg |
| | | tttttaatctgattggtgctattgcagatatctcagcatgccgttgtgaaaggtcagccattactaatgcttttaataaagttata |
| | | gctcagacaacatgtattgttcccccatggagcgaggctgctgttcgtgcagaaatgaaaggctcaagtaaaagtgcagataacga |
| | | tgctgctgttttggatgtagaccttgatcccaaggatgatggcgtgattgatgaaagtcagcaggatgacgcaacggaattttctg |
| | | atgccattactaaagttgagcaatggcttaaaaacgtaaacgaaatcgagattggaattcgtccgtcggcacttttgattggtaaa |
| | | gtatggagtcggttctatttcaaccttaataatgtagctgatcaacataaaaccagactctatagaaatgcagagcatggacgaat |
| | | ggctagtcaatcaaatgccgcgaaaattatgcgttttaatgttttagcatttcttcatgcggtattggttgaagagagtttatatc |
| | | attcggttagtgatagggaatatatcggtgaggggttaagactaaatccagttacttcagttgatgagtttgagaaaaagataaaa |
| | | ataattggtgagaaattaaaagcggataataaaacatggaaaaatacccatccattgtttttcttattaattagctgtccaattct |
| | | acatccgttcatttttcctgttggtgggattaattgttcagtcaaagcactgaacaaagaaacaagtttcaataagctgattgatg |
| | | aaattgttggcgataaattactttctgatgaagaatgggactatctgactaaaaataatgatcaaaaaacaaacactagacaacaa |
| | | atttttcaaaatactataacatcgctgaattcctccacaatcgtcggagcatcatacgataaggatacaccagccaggaaaaccaa |
| | | gtcacctttattaggtgatagcgaagaaaaatgataatggccttcgtataaggattgggtatggaaaggtttcttcttaactcaac |
| | | agttctgttatataggctaagcacagtctctttggatgaggtatcacttgatgagagagtggagtcatctgtattccttgctcaat |
| | | acgaacaggctcgtagtttacctgatcatgtagctaaatctgcttggtcatatttagtgcaacaaatcaaacagcggaatatgaaa |
| | | ctcggcccagtagcaatcttacgcctgatagctgaaaagtttattaaaaacgagaaaggtggccccaaaatcgatctacctatgtt |
| | | ctcggaatggcaaacgctgatgagtcgagtatcgtgtctaccaattatagcgtgtcatcaggtatttaatccagggccagccagtc |
| | | aggaatatagttttcgctggcctttatacccatatcacccgacggttgaagactacattacccgtgaatgcttacatgaaactcac |
| | | caacacctaaatggcagtaccagtgcagaagagtgttggctggatgcactcaaacacccagaagcatgcctcagagattttgagaa |
| | | gggctgggcatctcaagagatgaaacaactctgcgcccagattgatccatctctgacacctagaatcttcaaggatcgtttgcaaa |
| | | tcgcctgtaatattcgcgaaattctttgtcgggttgctcagggcgtggaattgccagagtggatagcatcaatgcaaaatccgcag |
| | | caactggcgaatagcacaattctgcataatggccgggagtatgggtttgcgacagtttggccaattgacgacaaatacagtcagga |
| | | gtctgagttttgctggctaaccggattgttggaaaaatggcggtttaatgcgccagaagggttagaacgattgctttggatttacc |
| | | tgctgattcaaaatcagtacttgaccttactggttcagcgagacgattttttcggatttgaacagttccagaattacaccatgacg |
| | | gagttgagggaggaaacagagaaatcttatttgtctcgttttaaacatgctcatggtgcaggagtgtattctcaggtgcgttatct |
| | | ggaaggacgttttgctccgaagagcgaccccaacaaaatgcaaaagctgctcttcagtgtgttaagaggatattgggaatatctga |
| | | gtgctcatatgtccatggaatgggtgcatgaaaagcctctgactatatcgcaagtgctcgataacctcgaactggttgaacctcat |
| | | ggcaagtgtgtagagctggcgctagtgccgcactttatcaaaagaaagcccaaaaatggtgaggcctatcctcacgcattactatt |
| | | caaagacctgaaaaatcaggcagctattctgatggacatgctgaagtctgaaccgcgtctgacaggctggattcgaggagtagatg |
| | | ccgcagctaatgagatgcacgcaccacctgagttattttgccccttgttccgggtactagccaaatcaggtattgctcattttacc |
| | | tatcatgttggcgaggactttccgcatctgatcagtggtattcgctccattgatgatgccttgagatttttaccattgcgtaatgg |
| | | cgatcgtcttggtcactgcacggcgattggtattacacctagcatctggaaacgctctttgccattgtccttatccatgaccaaag |
| | | agacgagattgctcgatttggtgtttatctggcgggaacttcgaagtcatccggaactgctgcgUacgctagtgatgcagcgattg |
| | | aagctgttcgcttggctcataaagtgttttcgctggaagaggaagtctcgattaccacccttgatcaggtatttgaaatgcggggg |
| | | ctgttggccgaatcggaaggcctactgagtgagctaaatgaaccattaaaacccaaatccctctggttggaagagtatgagcgcgc |
| | | cagagagttggttaaaacaacgggtatgaaaaggccgttgaagttgtataagcaatggctaacatctgacaatgtgcgaaagcagc |
| | | gtgctgaatatgttgaagttgccctagaatatttgccggatgaagcagttgttgcattacaacaagctgtaatggcaaaaatggca |
| | | gaccgaaacattgcgatagaatgcccaccgaccagcaatacacgtatcagtcagtaccgaaacgtcagcgagcatcatatctttcg |
| | | ctggatgggcttgccgggtgaggcgattgaaggtgatgttcctatgtctatttgccttggctctgatgatccggggatcttcgctg |
| | | cggacttgaaatccgagttctatcatctgttcgttgtgttaacccgaaagttcggtttgtcgccagcagatgctttgagaaaggta |
| | | gctgaggtgaacgagaatgggcgcatttatcgctttcatgatgtcagctagcctgtatacattgaggattctgtaattgttcaaga |
| | | ccagcagtgctcattgctaactatctat (SEQ ID NO: 26) |
| 30 | pLG032 | gaggatttatgcacaaaatcctgatgcgaaatgttttcaaaaattgtcaggttaacgttcctgcagatctttgcgttacatgtcat |
| | | ttctggatcctttcccgacaggttaggttgtgattgatatgatgcccatctctcattttagtgatcgttatccctttataaacagg |
| | | agtttatatgttatctatatgcaatagacttaaatcgatatacgtgcgcagcttacgattcacctctctacttactatttaaggaa |
| | | aagagtgaggggagaattgattttcattaagatattatgagagaattatgactagtgaaatagtgttaaatcttgatttcccagaa |
| | | tataaggatgatttttgtactgatagcattgatgagcaagataatgagttgtggcagcaacaggccaataaaaagctactttcgtt |
| | | tctcgaggtgatgggggaggaagcaagacgatataaagaaaataattcccgtagtacgcatccacattataagacattgagtagtt |
| | | atcaccatgcaatctttatcagtggcgcgcggggggcggggaaaactgttttcatgagaaatgccagatttagctggcaaaaacat |
| | | tataataaagatctaaaacgccctaagctatattttattgatgtgattgacccgacgctattgaatattgatgaccgtttttctga |
| | | agtcattatcgcttcaatatatgctacggtagaaaagcggatgaagcaacctgatattgcgcagaatatcaaagataattttatta |
| | | attcgcttaagacgttgtccggtgcattaggtaaatcaaaagattatgatgaatataggggcattgatcgtattcaaaaatatcgt |
| | | tctggaatccaccttgaaaaatatttccatcagttcttgatttcaagcgttgagttactggattgcgatgcgctggttttgccgat |
| | | tgatgatgttgatatgaaaatagataacgcttttggtgttctggacgatattcgctgcctgttgtcatgtccattagttctaccat |
| | | tagttagtggggataatgatctttatcggttcattgccaaaagtaaatttgaggaattattaaatcgtaaagcaaactctaattat |
| | | gctaaagaaggcagcgagatagcagaaagattatcagaagcatatattactaaagtattccccagccatgtgaagatacccctcca |
| | | accgatagatgagttgttgccatatctttatatacattctaatgaagatgaaaataaacaacatacaagctattctgaatttatca |
| | | aacttgtacaacaaaaattctactttctttgtaatgggcaagaacgaagcacaaattggccgcagccgagaagcgcacgtgaagtt |
| | | acgcaactaatccgttctttacctccgtctactcttagtaaggaagatgattcgggaactgatttatggcaacgcttcgctgtctg |
| | | ggcggaagaacgtcgcgatggattagcattaaccaatgttgaatcttatctgtttattaagaatgcgaaagcagtagaagatttaa |
| | | atctgtcaaatcttattgcttttaatcctttactgcaaaaaggaaaatatccctgggcagaaaaggatttttataaacagcagtcc |
| | | caacgtcggaaagagctcaatgcccccgaaacaaattcaggtatccttaataccgtattttccgaacaaaggaaagattttatttt |
| | | aagaagtatgcctgcgctggaactcattatggagcctatgtatgtcactaagacggtagcagaaaaaaatgataattctgcgctta |
| | | tagcgatctatacccattctgattattacagccagcagcagaacagacgatgtcatatattttttggcagagcttttgaaataatg |
| | | ttctggtcagtattagcgaaaactgaaaatcttccacaagaattttatgaaaaagataagtttaaatctttatttggtaatatttt |
| | | caaaaaagtaccattctactcaatattttcaatgaaccctacaaaggttgttgatgaagaaaatgacgatggcagtgaacctgatt |
| | | tttcgcaaaaactggacgatagcattaatgaactggtggaagatatatatatctgggcaaccagtaataaattgcgagccttcaaa |
| | | aataaaaatttaatacccttaatgacgtgcgtttttaataaggtattttcacagatcaatgtactgagaaaaaacgtgcaggacag |
| | | agttaaatttagagatgaacatttgtcagatctggctaagcgatttgagtatatgtttattaatgctatctttactttcatcagag |
| | | aaggggtagttgtcaataccaatgtggcaacaggcgcagctcctgccagagtacgtaatttatcagagtttaataggtatgataaa |
| | | acattatccaggaatatgtccgggattttatccgtgaaagaggataatggcttaacgatagtcaaagagagtgagggcgatatcgc |
| | | agatctgttatttgaaatttggcatagcccattatttaaattaacaaccaggacatgttacccaataggtaaaataaattcgcaaa |
| | | atacggcccaggaaaatttatcatcagattttaattcattttttgaaaatggtatcaacttcgaattgataaaacaatattattgg |
| | | caaacttcaaatcatgataatatcaggacagcagacgttagggaatgggcaacttcacgtcttaatgaagcaatcatccttttttc |
| | | atggatgaaagaaagcaagtctattaaagcgaaaattgacggacagagctacgagggtcggctctttcgcgggcttcagcaggcgc |
| | | tggaaggttatgaggaggtctgagtatgtttaatcaggatccttattggctcattcctaccctttgtctggcatcagaccgaattt |
| | | tttatgcacaattgcgagaccacttaggccagaaaagtagcggtgaacgcaaaaaagaaaaaaatggatatatactggtacaggcg |
| | | gcacaagactatcaattctattttggcggccgtattcggaaagaggatgtgcaaaataatgccttaatgtggcagatagaaactgg |
| | | taatgaaaattgcttatcgatgcttgatagtttgtcagcatatttcctcacatggcgcggcaattgttttgaggtcaggcgtgagc |
| | | gacttgaaccctggctgatgatctgttccgtgatagatcccgcatggattattgcctatgcataccaacaattgattaaacaaaat |
| | | gttgtatgtgatagtgagcttatttctttgctgacagaacatcaatgtccatttgcctttccaaaaggcagaggggacatttcctt |
| | | tgctgataatcatgtccatcttaatggtcatggttatagttcaatttcaatgctgaactttatagatggaaattataaggttaaaa |
| | | aagggataaaatggccctatcggcaggaatacaccctctttgaaagtggtcttctggataaaaatgatcttccccgctggctgtcc |
| | | gcttatagctcttgcttacttaaaaatgtatataattcatttcaacaaggaaaaagatccgaggtagatttcacatgtctgaagga |
| | | tgcggtcgaaacggtgcttgcggatgaggataaatattattttttagaggtagcttcgctatatgatgttgtcaccttgcagcaaa |
| | | gagtgctttatgaagccgcccagcagaaatatcactcacatcaacgttggttactgtatacttgcggaataatgttaggtacagaa |
| | | tctgaagattatgcgaatgcgctggctaacctgatccgaatcagcaatattctaagaaactatatggttgtatctgcggttggatt |
| | | gggacaatttattgattttttcggcttcaactatcgtcgaataacaaagccagctgatacaaacaaccgagttcattatgattctt |
| | | ctgctggtatttccagagaatatcgtgtctctcctgattttgtactgggtagcggcgtaatgcctgatatatatgccaggcaactt |
| | | ttcgatttttattgtacccaagcacgcaagggcgtacccgaacaaggacatattgttgttcattttacacgttcctttcctgacaa |
| | | aaaatcaacatatgataaattgctaaccgagtgtcgcgaacggttacgttctcagtgtgattattttggccgttttttaacatcgc |
| | | ttactttgcagtcgatagaatataaaaatttatctactgatgaagatcgaagcatagacattagaaaattagttcgtggctatgat |
| | | gttgctggaaatgaaaacgagctacaaatagaggtatttgccccggttctccgggtactgcgtgctgctaaatttaaaggggaggg |
| | | ggtgaactttaaaaggctacagcgcccttttattactgtacatgctggtgaggattattgtcatatactcagtggccttcgggcta |
| | | tggatgaagccgttgaattttgtatgttaggagaaggcgatcgtatagggcatggattagctctgggagtagatataaaactatgg |
| | | gcgaatcgccaaaagcgagcatacctgacggttggacaacatcttgataatttggtttgggcatatcatcaggcagtattactttc |
| | | tcaacatattgtcgagcatataccagtaatgcatgaattaagggataagatccattattggtctcatcaattatatagtgaaactt |
| | | atacgccagatttactctttaaagcatggctgctccgccgtaactggccggattataagtcaatcatatctgatccagcaaatatc |
| | | aatgaatgggtgcctgaccaacatattttagtcagtacagatgagactacagctaaggccagaaaaatttgggaacgttatttaaa |
| | | tagcggtctggcagaaaatgatgtttttaacagaataatttcagtaaattgtgcgcccgatacagcgcaaaatttttcaatgacct |
| | | ttaatgaaaatgaagatattttatccaaaggggaattattattgtatgaagctatccaggatttcttaatcgaaaaatatagtagg |
| | | ttgggtttagtcatagaagcttgtccaacctcaaatatttatattggcagactggagaaatatcatgagcacccattattccgttg |
| | | gaatcctcctgactcccaatggattaaacctggtgggaaatttaatcgctttggattgcgcacaggacctttatctgtctgtataa |
| | | atacagatgacagtgcattgatgccaaccacaattgaaaacgaacatcgcttaatgagagactgcgccatacatttttatggtatt |
| | | ggaacatggatggcggatttatggataaactcaatacgcataaaaggtattgaaatattcaaaggtaatcatttaagtcaggattt |
| | | agataatttaatctaaatgtaaacaagaaatccacgcaaatgcgtggattttaagtcaacttattattctctgaaacggtttaacc |
| | | gttcggaacaacagattaaatc (SEQ ID NO: 27) |
| 31 | pLG033 | tgtggttagttatcacagcactaacctattttcgagctttttgattgaccaataccatttcttttaattatgaataatgatgcgtc |
| | | aaccgatggcgaacgggccaaatccactcttctacaactgcccattgtcacggtgtggaataattaaaaattttagatttttgaga |
| | | ttattctcattaccatcttgattttatttggttttgcatcaaaattcatagttcacaagcttttctcactccaaaaacaactgtaa |
| | | agggattattgtgaacacgatatacataccattagacagcggagagtctgcggttcttaaggatccagataccttacttccccgaa |
| | | atatttacgaacagcttactcgatttattgaaaaggctgttaatgaagtaccgaagcctcacgaagcgcttaatgaaacccgtagc |
| | | cataaggctatatcgattgacggcgcaagggggacaggaaaaacgtcggtgctagtgaatttgaacgactatctgcagagtaatgc |
| | | tcagcaactggcggggaaaattcatatccttgatcctatcgatccgactctacttgaagatggtgagtcgctgttcttgcatatta |
| | | ttgttgctgccgtgcttcatgataaagagatcaaaactgcccaaagcagagacctcgataagtccagagtgtttacccagaagctt |
| | | gagaacttggcacacggactggagtccgttgatttgcaacagaatcaacgtggaatggataaaattcgctccttatatggcagcaa |
| | | gcatctggcaaattgcgttgaagagtttttaaaatctgcgttggagttgatcggaaagaaattattgatactaccgattgatgatg |
| | | tggacacttcactaaaccgggcatttgaaaatctggaaatattgcgtcgttatcttacctctccgtatgttttgccggtagtgagc |
| | | ggcgatcgccgtttatatgatgaggtctgctggcgagattttcatggaaggttgaataaggattcagcatataatcgcaagaacac |
| | | atatgatattgctagagatttggcaattgagtatcagcgtaaaattctgccgctaccgcgcagactgagtatgcccgatgtaagtg |
| | | attactggcagcaagatggtatcgaagttacgctagataaaaatggcattcctctgcgtaattttatggcatggttgaaaatattt |
| | | attactggccccgtgaatggccttgagggtagtgatttacctctaccgataccttcaatacgtgctttaacccagttcatcaacca |
| | | ttgcagggatttaattcgtgagcttcctgaaccattcagaaagaaagtcagtacgctggccttacgtcgtatgtggcaaatgcctg |
| | | atgttcctcttgatgttcttgaaagttttgctgaaaaacatcgggaattgagtaaagaagctaagcgtgaatatggggaggcttac |
| | | aagctattttatgatggactaaagaattttactgcttgggatagtaaggcttatctagaagatgataaacaatctgcatggctcga |
| | | taggttgtgtgagtattttcgttttgaacctaaggctggggctgtgtttttaacgcttcaggcaaaacagttctgggtctcatggg |
| | | cgcagggtgacaatcgtaatcaatcgattcttgcgactccgctttttcaacccttattgcataattttcgtgaatacgatgtcttt |
| | | gaaaggtatgatgatctttctgattgggaatctcagttaagaacaaggttaccggagagttggttgactgccattaaagggcaaaa |
| | | aacgcttttaccctatcctgtagcagaagcgggaattaataccagtttaaagtggaggtattgggaagaattagagaactatgggt |
| | | ttgatcctgctttggaaagcaaggcaaatttccttttgtccacgttgatgcagaggaatttttatacaaactctaaacagtcagtc |
| | | gtgataaatattggtagagtttttgaaataattattgctagtcttgtttcggatttagagttggccgacttgcagagaattagaca |
| | | acgttctccattttactctgctagcgcgcttgcacctaccaaaacgttagatttggaagaggattttacgaaaaagaatacaagat |
| | | ttatgaataacagaagtgaaactgacagagacatttctgatgatattcttgttgatgtgccggataaaaatgaggacgcatggaaa |
| | | aaaatttgtgatgaaataaaccattggagaaagacacacaatgtggctagtacaaacttatcaccttggctggtttataaggtctt |
| | | taataaaacatatagtcaggttgctaataatgtgtttgttcccagtggaatgcaaaatgttgatgcggctctaaatgtttttggta |
| | | gggttttttatgcagtttggtcagcatttggtagttttgaaaaaggcgaattgttcggactatccgatgtggttgctacaactaat |
| | | attatttcggcaaaaaatttttataatcatgataacttccgagtgaatgttggaccgtttacgcctgagcaaaaccaaaattctga |
| | | cagcgatcgtgaggcatatcagcatcgcaaaatgtatggtgaaaaaaccagagcggtaagttatgtattagcaactcatccgctga |
| | | aaaaatggatcgacgaggtattacgcactgagtttaaacaaaaacagaatgctcagattcagaccgagagaaaaatgccgattcag |
| | | gctgagaaaattatagatatcagcccggcaagagagtttatcacaagaaaactttcattaaattcacactcccggttggttaaaac |
| | | acgtataataaaacagcttaagatgttatatccaaactacgataaggctaaggacttcattgatgaagttacaaaccacttccctc |
| | | agaatgatcccgcaattaatacgcttcagaaagcatttgcagaactttaccccgatggtgacaaataatgttaactcggtctctaa |
| | | gtgaacatgctgcagggtgttttttcactgatgagcgtctgtcacaacgctttctagatatccttttatcgccacccaaggatttt |
| | | gaaacgtggtcatcattgcaggaggaatctttcaagctgctcgttaagagcatcgatagccgatatccacgcacttaccggttaac |
| | | cgacgtacgccagcttgtggggaacatatgtgacaacgggttactgacgagtccgacactaccttggctcgatgtcattgcggatc |
| | | agttactgttgcggaatggcgacttactctattaccgcgaaaataaggttcaagactacgtgcgaatagctgcggaactcgaccct |
| | | gcccttctagtgggatggcgtcttggcgactggcttttgcaaagcccaccgccgcgattgacggacataacccgtgtggtgatggc |
| | | gcagaatccgttttttgctccacctgctaatgcaggtaaaccttttgccgaggggcacgtacatctcgggggagtgacggctggag |
| | | atactattttggatggctatctttttgaagagattgaactacccaaaagcaaagatatgttgttgtgggcgcacaaagagcatgat |
| | | gagttaacaccgttgataaatcgagcaaagtctttgcttacagttctactttctgccccccctcaaacggtttctgagcaaactca |
| | | aaatggttttgatcagcgtaaaactgtatctgagaagtacaaggcattacagaacccaatggatagcatccatcgtctcccagact |
| | | ggttattgcttgctaaaaagaatcgcggaactgaaagcgtcagccccggctggtttttaaaccaactggcgcatgcctccgaaaaa |
| | | aaacatccctcgcgctggctgtggctgcagctatacctttgccactcttatcagcttaaagacactcatccactggagcgcacggc |
| | | aatactctgtttttggcttacggtaaatgcgctacggcgtcacattattatggacggacaggggcttgcgtgttttaccgagcgtt |
| | | attttaatggtgctttacgtgcgggtaagaaagctgacagtagcaatatgcgctacctgtttgccggtaaagacgatgtggccgaa |
| | | gtgaaagcatccccaaaggctttcgatcatgagatggtcactggattttcctcgacattgctgaaaaccctcggcattccagctgt |
| | | ttttccaccgtatatttttggtgagcatgagattaagccagatgaacgcgtgctgcgctatattggagcactggagcgctggcagt |
| | | tttgtgggcacttttctcgctctaaaactgcaagtcgcggcaagcgagcaaaggctgatttgcaggctaactggacagaagcggag |
| | | cgattgttacagaaactgtacagtcataatggctggaatcatcccgtcttcttagggggtaaacgtaacccacattttcattttca |
| | | gccgtcgaactggtttcgggggcttgatgttgcaggggatgaaaacgtactaaaaattgcaggctttgccccgatgctgcgctggc |
| | | tacgaagtggattatatcccgtaccagaagggcttcgcgccagtatgagttttcatttcagtattcatgccggggaggattacgca |
| | | catccggcgtcaggattgcgtcatattgatgaaacggttcgcttctgcgaaatgcgggagggagaccggctaggacatgctctggc |
| | | tctcggaattgaacctgcgctctgggcgaaacggcatggtgaaatgatactacctctggatgaacatttagataatcttgtctggc |
| | | agtggcactatgctacgcttttatcggcttcattgcctctcgctcaggcggtattaccgctgcttgagcgtagaattgcacgcttt |
| | | attgcacggtgcgaatggtgcaaaaagagacctccgcaaatagataacagtgtggtggggaaacaggcctgtagtgatgataaacc |
| | | tctggaaaatattacacctgatacgctctaccgggcctggctactgcggcgtaattgttcatatcgactccagcaactccacggcg |
| | | gttcccctttgacctcgcaagagaaatgtgcgctgccggattgggccacgctcagcgataaaggcaatgtggcggcgcagctttat |
| | | cagcaaagacactcgagtctccttgacgatatgccgccgcaactggtagttgtgcgtgtagcggacgaatggggaactcaggagct |
| | | tattggcttgggaaatcctggtaaactgcgtcagcaggctcttgacggtaaagatatcctccaagacattgatacgccggtagagc |
| | | tgcaatttatgcatgctttacaggactatttgctagatcactatgatcgtaaagggttaattatagaaaccaacccaacatcaaac |
| | | gtatatatcgcgcgattcaaaaagcacgtagagcatcctatttttcgttggaatcctccggatgaagaactgttgaaaccaggcgc |
| | | tgaatttaatcgttatggattgcgccgtgggccagtcagggttctggtcaatactgacgatccagggattatgcctacgacattac |
| | | ggacggaatttttactactgcgagaggctgcgattgagcgtggtgtcagccgaacgatggcagaatattggctggaaaggctgcgc |
| | | ctgtacgggctggaacagtttcagcgtaatcatttaaatgtatttgaagttattgaatagaggattttatcgtgagtggtacattc |
| | | ccttacttgcaatatacggatgtcaatgggctacaacctaagctcaaagaagagttgaaaaatttacggagaaaagagtatttgtc |
| | | ctactggcctcgttttctgatacgtagaatttcgctttatgctcttccattcctcatgttcttcacttttttcttttgtctgagtc |
| | | tgacgaagaaagttggggcagaggaagtgactaatattcttggaaccgtgagtatatccttcagtagttgcctgctgctggggatt |
| | | attatttctggtgtcgtgttactcttgcagtggacgtgcttcaactgtaaatacagtccgcaggatacgaatggagttgttggggc |
| | | tcgtaagttaaattataaattacttgctcatgttgtatttgttattgcatgcgtgcttttatttgtttttatttattgcaccaata |
| | | ataaagtgttttatggttttatcgtgtttcttggtttgacattattaccattggtaattgaccgtaccttgggggtgactcgtcaa |
| | | aatgaacgtcacaaactctatatcagaaggttagagcgcctcgatgaattgaatattctccgggagaaaatgaatattaaattcga |
| | | agaatcccatttcatcgagtatatgaagcttgttgatgaagctgatcacggaaaaaaccaggatacagtaagcgatacatcctatt |
| | | ttatgacgttgatagaaaataagctaaaagtgtaatcggttttaatatgatgctgtataaaaaactacgcaattgcgtggtttttt |
| | | gtcggactatgagggcaaggttgccctaaaacagaggttaaacgttgggatgtgatttattgcacatcatgccgtgcccatccagt |
| | | agaatccggttcgaaatgtgtataggattgtgtatatgtttctgttcggtctcggattcttatacac (SEQ ID NO: 28) |
| 32 | pLG034 | accgtgctggcatgtttttacggagtgacgctttcattaacctgtacacgaacttctattccggcatcatgacaggcctgcagcca |
| | | ctgcgccacttccagcggatcgccctcccggcgtaccactctgccttctttattccataactgcagacaggtgctgccgtcgagacg |
| | | caccacaaaatccccacggcaggcctgataggggtttgagggccaaccgtacgaaaacgtacggtaagaggaaaattatcgtcttaa |
| | | aaatcgatttatgctatcacagtcgtctcttcaggtaagtacggttgcctttgcctgctttcttctcgtctggttaagttaagaaat |
| | | tcagagatccatgcttgagataaaagcggaataaaaccagtaaaatgtaactaaaacaacaacggaattgtatcaatgataatgtcc |
| | | acaccgtggctgacaccgatcgttgccgatagtgatcatgctgaggcaaatgcagtgagctatgaagcactgactccgacagaactc |
| | | gactcagataaagcaggctgttatatcagcgcgcttaattatgcttatgaacatccggatatccggaatattgctgttaccgggccg |
| | | tatggggcagggaaaagctcagtattaaaaacatggtgcaaagctcacaatgggacactgcgggtgttaaccgtttctcttgctgat |
| | | tttgatatgcagagacatgtggatgaaagtaatggggacagcagtagtgacgaagggacgaaaaatactggtagtgttgaaaaatct |
| | | attgaatacagtattctgcaacaaatactctacaaaaataaaaagcatgagcttccctgttcccgcattgaccgtatatcagatgtg |
| | | actgcgggacaaatattgcggtctgcgtcttttctgacaggaaccattttactgagtggagctgctttatttttccttgcgccggat |
| | | tacgttacaacaaagctatctttgccgggagcattcgcccgttaccttcttgaatgcccgtttggggtgcgtgtgtccggtgcagtg |
| | | gcatctgtgatgggatcgttatgcctgcttttgaaccagttacatcgtatcggtatatttgacaggaaagtaagtcttgataaagtg |
| | | gaccttctgaaaggcgctgttacaacccgggcatcatcaccttctttacttaatgtctatattgatgaaattgtctatttttttgat |
| | | tcgactaaatatgatgtagtgatattcgaagatcttgaccgttttaacaatggccggattttcgtgaaattgcgggaaatcaatcaa |
| | | attattaataactgcctttctgacagaaaacctgtaaaatttatttatgctgtcagagatggtattttcaactcagcagagtcaaga |
| | | acgaaattctttgattttgttatgcctgttattccagtgatggataaccagaatgcttatgagcattttgttaaaaaattcaaagaa |
| | | gaagagataaataataacttaagcgaatgtatttctcgtattgcgacatttattcccaatatgcgtgtaatgcataatattacaaat |
| | | gagtttcgactctatcagaatttagtcaatagtcgggaaaatctggccaaactacttgccatgatagcatataaaaatctctgtgcg |
| | | gaagattatcatggtatagatagtaaaaaaggtgttctttatcattttattcaaagctacttagaccatgaaattcagaatgaatta |
| | | ttacattctgcaaataacgaacttgaggatatggcacagtcacttgtagcgataacaaatgaaaaactcgcaaaccgggaaaatctg |
| | | cgcgaagaactgctcatgccttaccttagtaaaaattatagcggcgcgcttgttttttatacagaaggaaggcaaataagtcttgat |
| | | gatttgatacaagatgaagatgaatttctcatgcttttagataaggaaaatattcaggtcgttaccccctataacagacaaaatttt |
| | | ctcatgataaatcagcgggatacagaaaaactgaagcagcagtatgaaaaacgatgccatttaattgaaactaaatctgttgataat |
| | | ataaccagagtgaaaaataatatttccagtctggagtcattgaggaccgaaattctttccggaactgtagctgatatagcagaaaag |
| | | atgacaaatgaaggctttgttgcctggataaagaagaaagaggatacaggtgtcctgacgattcagtcggaacatgaacagattgat |
| | | tttatattttttctgttatcaagtggttatttatcaacagattacatgtcctatcgctcaatcttcattcccggagggctgagtgag |
| | | acagataatttatttcttaaggatgttatgtctggtaaaggtccggaaaaaacattctcattccatcttgataacgttaataatatt |
| | | gttgaacgactcaaaaagctgggggttctgcagcgtgacaatgctcaacatcctgctgttatcagatggctgattgataatgaccct |
| | | gataccctgaaaaacaatataatggcattactgagtcagacgggtagccagcgtgtggttagtttgctgatgttgatgcagaacgat |
| | | ttcacaacgtatgttcgcctgcgttacctggagatttttatgtcagatgaacatatactgaacagattgctggcacatttatgtgcg |
| | | tcagaagaacgcacacccgagcaaaagttttttgttcaggaaatagcggcacacctgttatgcctgactgaaaaatcaaatatctgg |
| | | caatcggttgagattaataaacgtatcggtgagcttatagattcctccccaattcttattactgctgtgccaaaaggatatggtgat |
| | | gcgttttttgaagtgttgaaagataatacactttcagtttcatatattccaggtgatgtgggagacgagaagtgttctgttatcagg |
| | | aaaattgcgggtgcaggattattcaaatattccgtcagtaatcttaaaaatgtttatctttgcctgacgcaagacaagaatgaagaa |
| | | agaatgtcattctctctttatccgtttcattgtctcgagtccctggctatttctgaattaacagaaattctgtggactaacatagaa |
| | | gattttattttatcggtatttattgaatcggaagagattgatcgtattcctgaattgctgaattcttctgaagtctcaatgactgtt |
| | | gttgaacagattatagccaaaatggatttttgtataaataatctggatgatattattaatcgttcagagtgtgcggacaataatgct |
| | | tcagggagaaatatctatagcatgctgttgcagcatgacaggatttttccatcctttgataatattattcatttattgcatgataca |
| | | tcaattaatacttccggtgaacttgttcagtgggtaaatgagaaacactttgaatttgaaccatctgatatagtcataaatgataca |
| | | ggaatatttaataattttatttctgaattaatttgctcgccagtcatttcagaagaagctttactgaaagtactgagtaatttaaac |
| | | gttgttattatcgatgtgcctgaaaacattccattgcgaaatgctgaactgttatgttcagagaaaaaactggcaccgacagttaat |
| | | gtctttacggtgttgtttaatgctctcagtgaaaatgttgatgatattaacaggatgaatactctgcttggtaaccttattgcccag |
| | | cgtcctgagattattacccaggagccagaagatattttttatatcgagggtgactttgatgaagaactggcaagcgaactttttcgt |
| | | cacaagctaatcggtatgaatataaaagttgccgctttacgctggttgcgtgataacaaaccgggaattcttgataagagctacctg |
| | | ctgtcattagatattctggcagaactgagtccctggatgggtgacgatgatctgcgcctgacactgcttaaacgttgtctggttgcc |
| | | ggggatgctggcaaagacgcgctttgcgtggtgctgaacagttttgctgatgagagctatcatggactgttaccacatgacaggttc |
| | | aggaaaatccctcactccgtggatttgtgggaagtggccgaattaatcagcaatcttggatttattcagccgccaaaaatggggtca |
| | | gggcgtgatgaacacaaaattgttattactcccgtacgctatgtccgtgatgttgagttttatgactgagcatcattgatacggtgt |
| | | tttaattgccttaaatacaaaaataaaaacagattaatgcttaatgtgcattaatctgttttagttatcaatggctgttaattattg |
| | | ttaattttacattaatctttctttttcttcaggaagatccgaaaactcctggtcacggatcttcct (SEQ ID NO: 29) |
| 33 | pLG035 | attatctgccaaccgataagatggctgcctaagtcgtagcgattcagcactgttttagcggcgctcgattgcaaagtcgtgctttg |
| | | ctgacttgcgattgtgctctttacgagcaaagctttcaggtatagtaagtgctaactgtagtgtaaaattatagggatagatgaag |
| | | aaaacaacgaggctttagctaatctttgcagttgtgtctgctataataaggcgaaattttatctgcatgattttgtttgattaact |
| | | ccgaaagccagctctctcggtgaagattgggaagggatatcaatgagtgatgatagctataaatttcaaaagttaacgccgttcag |
| | | cgatgttgagctgggtgtatataaaaatgcgatagattttgtttttgccaataacgatctaaaaaatgttgcgatatcagggcaat |
| | | atagcgcaggaaaaagtagtcttatcgaatcctataagaaaagtcattcaaatataaagtttgttcatatctcacttgctcatttc |
| | | agatcgattgaggaagctgaaactaatgaaccaagtaaagatataaatgaaaccgcgttagaaggtaaagttcttaaccagttaat |
| | | tcaccaaattaatgctgatgatattccccagacacattttaaagtaaagaaaaaaataaaaactaacaacattgtgataaacacca |
| | | tctttacggtgttatttatcgccatgatactacatatcacgctatttaataagtgggaaaagtttgtttcacttttatctgaaggt |
| | | aatataaagacactacttacattatcaactaaatacgatacgcttttaattagtgggtttatatgtactatcctatcttgtatttt |
| | | catttacaagttaataaaaacccaaaagaatcgtaatgttcttaagaaaataaatttacagggtaatgaaatagagatttttgaag |
| | | aaagtaacgagtcttatttcgatagatatttaaatgaagtattgtaccttttcgagaacgttgatgctgatgccattgtttttgaa |
| | | gacatggaccgttttaatagtaataacatctttgaacgtcttcatgaggttaacagactggttaatattcaacgggacacagcagg |
| | | gcacaagaaatcgacgttacgttttatttacttgcttcgtgatgatatcttcatttcgaaggatagaaccaaattctttgattata |
| | | tcattccagttattcctgttgttgatagttctaactcttacgatcagtttatcacacattttgatggtggtggtattctcaagttg |
| | | ttcaatgaaagatttctacaagggatgtctttatatattgatgatatgagaatattgaagaatatttataacgaatttcaaattta |
| | | ttataacaaattaaacacgacagaacttgactgtaataaaatgttggccattattgcctataagaatattttcccaagagatttta |
| | | gtgagttgcaacttaatcaaggtatggtttataccatatttagtgaaaaagacaaccttattattgaagaaataaagaaaatagaa |
| | | aaagatattagagatagaaaaaaagagattgaggcaatcaatgatgaaatactcaactctagtcaggaggttgatgctatatacga |
| | | taaggaattatctagatataataatcatcctcactataatcaggctgagaaagctgatatagcaaagagaagggcggctagaaaag |
| | | aaagtgttgaaaataaatttaatggtaaaatagaagaaattaatgagcttatatcaagatcaagagaaagtttggttgattctaga |
| | | aacaaaagacttaaagaagtaataactagagaaaacattgatgaaatatttaaactcacctataccaatgaaattggagaggaaag |
| | | agactttaatgaaataaaaagcagtgagcattttgacttgcttaaataccttattcgtgatggttatattgatgaaacctataccg |
| | | actatatgacctatttttatgaaaatagcctgagtcgaattgataagatgtttttacgcagcattaccgatcaaaaaggcaaagag |
| | | ttcacttatcaactcaagaaccccaagctggtcgttgcccgccttcgagaagtggattttgaacaggaagaggcgcttaattttga |
| | | tttattagcttatctgcttcaaacgccagcccaggtaaacttaataaaacgtttattcaaacaactaagaaaagatagaagagttg |
| | | agtttattcgtggttactttgaaactgagagggctcagcctgtcttcattaatcgattaaatacacagtggcctgagtttttttct |
| | | tatgcgctgacagagagtgaattttctgctgattgggttaaactctactctataggcacgttttattattctgccaatgacgccat |
| | | cgaggccattaatattgatgattgtctgactgattacatctctgattcggcaggttatttagcaatatcagaaccgaaggttgaca |
| | | aattaattagtggttttaagttgcttaacgtctcttttgtcagtattaaatUgaaaacgcaaataaagtactctUgatgcggttta |
| | | ccagcattcactttatgatattaatttttccaacctgaccttaatgctgagtaaggtttacacgcttaatagtgaagatgatattc |
| | | gccataagaactatacactagtgatgtcacaacctgattctcccttggctagttatgttaataaccatattagggactatctggat |
| | | atggttttatctagttgtgatggttcaatcgtggatgatgaatccattgttttatccgttcttaataatgagggaatatctgatga |
| | | acaaaaaggccagtatataaacgctttgcaaactttcgtgacatctctgagtgaggttgagagcgaatctttatggtcatctttgt |
| | | tggataaagatagagcagtgtgctctgaggaaaatattgtctcttattttgaacatgttgatggactggatgactcacttatcgaa |
| | | tttatcaatagaactgatgtagacctgaattttcaaaatattaatattgataacgagcttaaaggtaaattatttaaatcgattgt |
| | | tatctgtaatgatttatcaaatgataaatatgaaaaattaatttgctcactaaatattatttgtaaaacatcctttagcgctagta |
| | | atatcgcgagtgataagttcaaaatattagtggataaaaatattattcgtatgaatgttgcgccacttaatttcatacgagataac |
| | | tattcagagcaactttcctattatattcataagaatatcagggcatacgttgaattaatgacgattgataactttattttggatga |
| | | ggctatatcaatactttcttggaaagttgatgatgatttgaaagttaagctactcgagtttgttaaaactccgttggctatttata |
| | | gtaagaattactctcaggtcgttaatgactatattttagaaaataattttaaaccagatgaacttctaatcttgacgtcatcttat |
| | | aaaacttggggaacctctactcagtcgctcatcttgagtcgagcaatacaggatatatcagcattgatagcaagtcctaatgatgt |
| | | ttctgaaccgttactaaaaaacctgtttgtcgcagagggactgaatatgcagaataaaatagcactgctaatcgctttgttgccgg |
| | | gtaaggatttgagtaagacgacttgcaaagagtatcttgatctgcttggtttatcggagttcagtaaaattttggggcgaggcaaa |
| | | cctaaaattgaagttgattcaactaatcaaagtttattaacagcattaagagataaccacttcttctctgattttgaggtggataa |
| | | tgaaaatcccacttattataaaataacaaggcggcgctctatgtttggctcagatacatagcattatgtatttttctacagtttgg |
| | | gcacttttatagtgcccaatttttacgctgaaacttacgcagataatctgactttttcccagttgacgagtacacctag |
| | | (SEQ ID NO: 30) |
| 34 | pLG036 | atctatagcagtcatcatattggattattggtgaagtggtacactgaatttgcccacctgaacagagttggttttatcaaacctgt |
| | | agtttactcaatgacgtaaaaattggtgatgtaaaggatataaaaatgtggtcagacaaagagtcatcagaagactacctaaattt |
| | | tggtgaagtatctcagttagccgtggatgtacttaccacgaaagatatgttaccagtatctatcggaatttttggaaactgggggg |
| | | caggtaaatcctctctgttaaaactgatagagcaaaaacttgagcaagacgacaaagattggattgttatcaattttgactcttgg |
| | | ctctatcaggggtacgacgacgcccgtgccgcacttcttgaagtcatcgctacagaattgacaaaagctgctgaaggtaattctac |
| | | ccttatatcaaaaactaagagactccttagtcgagttgatggttttagagctatgggattactagctgagggtacagctttaatgg |
| | | caggattacctactggcggtttgctttctagggggattggtgcattaagaaatatcaccgatggcatccagagccaggaagagtat |
| | | gaggctttaggcaatatagctaaagaaggtaaagaaactgcttgtggtttgattaaaccacaaacaaaaaaaagcccccctcagca |
| | | gattgatgcctttcgtaaggaatatggggaaattctagaagaacttggaaagccactcattgtggtaatagataacctagaccgct |
| | | gtctccctgccaatgctatccatacacttgaagctatcaggctattccttttcttgactaatacagcctttattattgcagcagat |
| | | gaggacatgattcgctcttctgtggctgattacttcaaaggggcatcacagcgccatcaaatagattatctggataagctaatcca |
| | | ggttcctattcgggtgcctaaggctggggtccgtgagatccgttcgtatctgttcatgctttatgccattgaacatggcttagaag |
| | | gcgaaaaaataactatgctccgtgagggcttagagaaggcgttacagcaatcctggaaagatgaaccaatctcacgtcaggaggcc |
| | | ttaaaaatgactggtgaagcggatgatagcaacctcgcgctggcgtttgcgcgtgctgaccgtattgctcccattttagccaactc |
| | | tccaattattcatggtaatcccaggatcgttaaacgcttgttgaatgttgtgaaaatgcgatctcaaattgcgaagcgacgagcaa |
| | | tgcctttggatgaagcaattattactaagctagtaatttttgaacgctgtgttggagtggatggcaccgctgatttatatcatctc |
| | | gtggatattgaacaaggtgttccccagatacttaaacagcttgacgataatggcggtcaaatacctactgatgcaccaaagacatg |
| | | gactgatagtccaacgactaaatctttcatcagtcaatgggcccaacttgaacctcgtcttggtgggattgacttaagggccgcca |
| | | tatatctgtcccgagaaactatgccaataggtgcatatgtggttggtttatcgccatctggacgggaagtactaaatgcactaatt |
| | | gaattgaaaaacactagttctcctacagcagaaaaccttttgaaagcacttcctcgtgaggagcaaatacctgtaatggaaggttt |
| | | aattaaccagttacggcaggtatcagattgggatcgtaagcccagaggcttttccggcgcatgtctgttggcccgctactcaacag |
| | | atgcagccagcatattaattcgttatctacaggaattacagttggggatgaaacgaccagcgtggatgactgcagcattaaaagat |
| | | gaacaatggaataaggacgcttaatgggaacatcacaatcaagtaaaggtccaggaggtggctctccgctggttccaccatgggct |
| | | gatgatcagccacagcaaccgttaccctcgccgcaagaaaggaggtttgcgccatttcgagaatcgttgggaaatgcggtatcaaa |
| | | tggaaatcgagcagatttcagaaaagccatagggcactacgcgcgaaaagcctccggagggagcagtaacgctgctcggcgattag |
| | | ggagtgtcacgcaagctggggccgaattatttggggctttagtgggaatgccttcggctcccggagaaccaagcatcgatttgggc |
| | | agtttggcaggccttccatgcgaaatagcaatatcaactattgctcaagctttaacatcacaggatggtgactcagaaaagatctg |
| | | tgcggccatgaaccatgctttagtggaggctcttgatggcgtagaaattttcgatcctcaaaaaataactgatggtttgattgttg |
| | | acacaatgattggttatctagcggaaagtattttccttcagatggtaatggattctaatagggcatggaacaaagcagatacacct |
| | | tcaaaggcaattcatgcagaaattgaactccgggaattgattaaagttgttgttgataaacatatggcaccaaaacttgccggtaa |
| | | cataagatcgttcacacgaaaccaaatggtaaaaattgaacgtcaggccattattgaggcctggcaagaatgggaggcataccagt |
| | | gacacaattagttttccatcataaacatcaccatttgccgccagcaagtgagaaagtgttacctgttcagctatatggattaagtg |
| | | gtcagaggcgcggagatatatctgttatcgggaatcctgcgattgatcggatcagacgtttgggagtacagcttccagctaaggtc |
| | | atggattttctgagtgttgcattagcagtaactgcagcagatactttcgttcagcgtgaaagttccgaggatggttggacccgcca |
| | | attgtcgttacgactcccccttcatgaaccatccagatggattagtctaaagaaagaacttgagagtgctttgcattttcttagtg |
| | | gagacatctgggatttcgaattttgtgacgatggttatgcaccgccagagccttatagccagcattcaaggcatcgtctgattaag |
| | | ctaaaagggcttgactgtgtcagcttattttcaggaggtctggattcagctattggtgcaatagatcttctggctgcagggcgcgc |
| | | tccacttttggttagtcatgcttataaaggggataagtctcgtcaagatcagattgctgaaaaattaagtggccaattttcgcgct |
| | | ttgagattaatgctgacccacacatttatcaaggcgtgactgatattacgatgcgaactcgtagcctcaattttcttgcccttgcg |
| | | gccgtaggtgcttgtgccgtacaagagatatctcaacaagaaaagattgatttgttcgtacctgaaaatggatttatctcattaaa |
| | | tgcaccacttactccacggcggataggttcgctgagcacacgaacaacacatccacattttattacgagcatacaaaagatctttg |
| | | atgcgctcggtatttcttgtcaaataatcaatccatatcagtttaagacaaaaggaaaaatgatctccgaatgttcaaataagcag |
| | | ctcttatctaaaattgtggaaagtacagtatcctgcagtcattggaaacgaatggggcagcaatgtggggtatgtataccgtgtat |
| | | cattcgacgagcatcacttcatgcagggggaattagtagagatgttgaatatattttccagtccttagctaaagtaatgaatgaaa |
| | | tagatcgcagggacgacctgatcgcccttaggattgcgatcacgcagaaatcgactttgaaaataggtacatggattgccaaaagt |
| | | ggccctttgcctacggcagaatttgataatttcaagcaagtatttaaggatggcctagatgaggttgaaagctatttactgagtga |
| | | gaacatagtatgagcatcgatatgcactgtcatctagacttatatcctcggccagacctcgtggctgaagaaagtaaacgtcgagg |
| | | gacttatattctgtcggtgacaacaacacctaaagcatggcatggtacttctttattggctaaagaaagtcaacgaatccgaactg |
| | | ctcttgggctacatcctcaaatcgcgcatcaaagatcgcatgagttagacctgtttgattcattgctttcggaaactaagtatgta |
| | | ggggaaatagggcttgatggtggacagggatttaaagaacattgggatattcaattgaaagtgttccgacacattctcaacagtgt |
| | | aaatcgggctggtggcaagattatgactatccatagtcggggaagtgcatcagcggtgcttgatgagattgaaaatatcgatgggg |
| | | tggcaatattgcattggttcactggaacacctaagcagcttgaaagggcaattgatttaggatgctggttctcagtggggcctgct |
| | | atgctcgatacaataaagggtaaggccttagttttgaaaatacccaaatcacgcattcttacagaaacagatgggccatttgctaa |
| | | gtttcgtaatgacccactaatgccatgggatagtgggattgcagagaaacagttagccgcattatgggggattagtcagatggagg |
| | | ttaatgctcagctagttgataattttaaggtattatgtacatcataagaatgaaaaacttagatatgcatttacagttcaattcat |
| | | ttttcgtcatcagttaattacacataaaattaaaagtaagaatatatctaccctgtgaatgagcaaggcggatttatatagtttgt |
| | | aattagtttaaatgtaagcagttcgtcagagtgcgtattccgctctattcgatcacggattggccgttatgaccc |
| | | (SEQ ID NO: 31) |
| 35 | pLG037 | gaaattatttggaatggatgatggcgcttgattactggaacaggtctatgacatgaaggttatgatttgttcactgctatgaggtt |
| | | aacactttaacaatttcccttactattcttgtactaattccttccaaatacttctgcttgagattaggatttatcctcttgtagtg |
| | | ttatttacaataaagattgtgatgctgatttaacccaacgtgttgtcagttgccttgctgaactaagttcagtatctagaaattag |
| | | ctcttgatacatgagcgaatcagcgaaaattttcatcccgaccaattaatgaccgtaatggataggatgttgctgctatttggctt |
| | | ccatgagggaacatatgtttttaaacgatcaagaaacgtccactgacctgctgtactacaccgctatcgccagcacagtggttagg |
| | | cttgttgatgaaacgtcagatgcacccattacgattggtgtgcatggtgattggggggcgggaaaatcaagcgtactaaaaatgct |
| | | tgaggctgcctgcgagaaaaaggataaaacgcactgtatctggtttaacggatggacgtttgagggattcgaagatgctaaaactg |
| | | taatcatcgaaaccatcgtcgaggatcttgttgcctcgcgcccgatgagcaccaaggtggcagaagcagcaaaaaaggttcttcgt |
| | | cgaattgactggttgaaaatggccaagaaagcggggggactggcgtttaccgcatttactggcatacccacatttgatcagattaa |
| | | ggggatgtacgaactggcatccgactttctaagtgctccgcaggacaagctttctgctgcagatttcaaagcgtttgctgaaaaag |
| | | caggaggcttcatcaaagaggccgatactgatagtaatacgctacccaaacatattcatgctttccgtgaggagttcagggcgctg |
| | | cttgatgctgctgaaattgaaaagctagtggtgatcgttgacgatcttgatcgctgcctgcctaaaaccgcgattgaaacgctcga |
| | | agctattcgccttttcttgtttgtagagaaaactgcatttgttatcggtgcagatgaagccatgatcgaatatgcggtaaaagacc |
| | | atttccccgacctgcctcaaagcaccgggccggtaagttatgcacgcaactatcttgaaaagctcatacaggttccatttcgaatc |
| | | cccgcactgggaactgcagaaacgcgtatatataccacgttgttgcttgcagaaaatgcgttgggttcggaggacgacaattttaa |
| | | agcattgctcaataaagcacgggaagagatgaagcgtccttggatcagccgcgggcttgacagagaggcagtgatggcagcgttaa |
| | | atggaaagattccggaggttgtggaaaacgcgctgctattcagcctacacgttacccctatgcttagttcggggacacatggtaat |
| | | ccaaggcagattaaacgctttttgaactcaatgatgttacgccaggcgattgctgatgaacgcgggttcggtagtgacattaagcg |
| | | tcctgtactggcaaaaattatgcttgctgagcgtttttaccccagcgtatacggaaagcttgttcagcttgtatctaatcatccag |
| | | agggaaaaccggaagctttggcggagtttgaagccttggtcagaggggggaaaactgctccgaagagtcgcgctgacagcaaagag |
| | | aattcctcagagtctgaagacgtccaaaactggctgaagattgattgggcgatcggttgggcaaaagcagagcccgcactttctgg |
| | | agaggatcttcgtccatatgtgtttgtcactcgtgacaaacacagtactttgagtaatctggtcgtatcaagccatctcattccta |
| | | taatggagaaacttcttggtccgaaaattgggatggtgaaaatcaaaggggatttagagaaactgagtccaccggatgctgatgaa |
| | | ttattcgaaatgcttagcgataagcttttccaagaagacagtttcaatcgaaaaccaagaggatttgacggcctcgaatatctcgt |
| | | agaaacacaacctcaccttcaaaggagattgattgattttgcacggcgcattcctgtaaaaaaagcagggggatggcttgctaccc |
| | | gtattgcgcaaagcctagtggaccctacgttaatagaagaatatacaaaactgatccaagaatgggcgagtcaggacgaaaatctg |
| | | tccctctctaaatcagcaaaagcaaccctccagttatcgggatatcaacattaatgggaacctcaaaagcttacggggggcctgtt |
| | | catggcctaatccccgatttcgtggagaatccatctccaccgaccctgccgcctgttgaccctgcggatgatagcacgctggatac |
| | | gccgctcattccaccggattcgagtggctcagggccacttagcacaccgaaagcaaactttactcgatactcccgttcaggaagtc |
| | | gtagttctctgggtaaggcggtcgctggatatgtccgcaatggagtggggggcgcaggcagggccagccgccgtatgggggcctca |
| | | cgcgctgcagcagggggactgctcggtctcatcagcgactatcagcagggaggtgctactcaggctcttgagcgcttcaatcttgg |
| | | taatttggcagggcagtctgcatcgactgctcttctctcccttgttgaatttttatgccctccaggtggttctgttgacgaggggg |
| | | ttgcgcggcaggctatgctagagaccatcgccgatatgtctgatgtaggagaggagaattttgatgagctcactcccgatcaatta |
| | | aaagaagtctttattggtttcgtggttcactccattgaagggaggctcatggcggatattggtaaaaatgggatcaagttaccaga |
| | | cgacatagacgctatcgtcagtatccaggaggacctgcatgattttgttgatggagctactcgtacacagctccgtgaggagctga |
| | | ggaatcttacagggctttcaggggatgctatagacagaaaagtggaggagatttacaccgtggcatttgaattacttgcccgagaa |
| | | ggggagagattggaatgagccatcataccttagttgcccgtttgggcactgacgataactccgatttacagctcagccgccaaagc |
| | | acgcatctgacagaaattaattttctcaaagagaacggtaaactggatttcggtctcgggcaggcgctgaatggtttgagtgatct |
| | | tggtttaacgccaatggatgtctccgtggatctggcactactggccgcaacggtgactgcggcggacacccgaatctcacgtgggc |
| | | ataacgctcaagatctgtggacgcgcgaaattgcactttatatcccggtagcttccccgacattatggaatagtcagactggattg |
| | | ctcagcaggatgttgaattttcttaccggcgaccgttggacaattcatttccgctcgcgccctgttattgagcacgggctcattca |
| | | gcgatcctctaaggaacgttcggtgaaccctacttctgtttgcttgttttccggggggctcgacagcttcatcggtgccattgatt |
| | | tattatctaatgggggaaccccccttctgatcagccactactgggatacgactaccagcgtttatcagcagaagtgtgctcagctg |
| | | ctgtcggagcgatatggacaatcgttcagccatgtgcgagctcgtgttgggtttgaaaaaacaacgattgagggagaagatggaga |
| | | aaacacccttcgtggccgctctttcatgtttttctcgctcgcgacaatggccgcagacgccctcggcgggccggtcacgataaacg |
| | | tccctgaaaatggtttgatctctctcaacgttcccctcgatccgcttcgtgtcggagcgctaagtactcggacaacccatccgttt |
| | | tacatggcgcgttttaatgagctgctgggcaaccttggcatcagtgcacatctggaaaatccctacgcctacaaaaccaaaggtga |
| | | gatggctatccattgccatgaccatgcttttctaaggcaacacgcggctgacaccatgtcatgttcgtctccgcaaagtacgcgtt |
| | | ggaaccctgcgctgaatgagcagcaatcaacacactgtggccgatgtgttccatgcttaatcaggcgagcatcattgtttacagct |
| | | ttcggcacggacgatacgatttaccgtatcccggatctccgtagccgggtactggacagctctaagcctgaaggtgaacacgttcg |
| | | ggcatttcaatttgctctggcaagattggcgcgatcaccgagtcgagcaaaatttgatattcacaaaccagggccgctcagcgact |
| | | atcccgactgcttagctgagtatgaaggtgtttatctgagaggaatgaaagaagttgaacgcctgctgagtggagtcataacgagg |
| | | ccccttacatgaaattagcaggacagaagcccgctccacaatgggtcgattttcactgtcatctggatctataccccaatcactct |
| | | gcactcatccgtgaatgtgacatttcacgtgttgccacgctagcggtgacgacaacccccaaggcatggatgcgtaaccgggagtt |
| | | aacttccgattctccttatgttcgtgtcgcacttggtctacatccccagctgattgcggaacgtgagcatgagatagcgttactgg |
| | | agcactatctcccttctgcacgttacgttggggagatagggcttgatgccagcccgcgcttttatcgcagctttgaagcacaggag |
| | | cggattttttcccgtattctgaatgcctgtttcgagcagggggataagattctcagcatccacagcgttcgcgctgcagccaaagt |
| | | gttgggacatttggaaaacaccagacttactgaaaattgcaaggctgtcctacactggttcactgggagtatctccgaggctcgac |
| | | gagctgttgaacttggatgctatttctctattaatgaagagatgctacgttctcctaaacatcgaaagctggtgtcctttttgcct |
| | | ttcgaacgtatcttgacggagaccgatggaccttttgtgtttcacgaagaaaaagcgatacaccctcgtgatgtgcagcgtacggt |
| | | tcatgaaatcgcgcagatccaccacgtatcggacacagatgctgctatgagaatactttataatcttcgaagtttagtcaccaata |
| | | gttctcacagtgagaatagttcatgaatctaattagttggattaatacaggggaatagttgaatacttcagtcccctaaaagctaa |
| | | tatgctctatgtcatctaatgataagtggctccaaagagccacttatcattaacttttctaaagggaggtagaagt |
| | | (SEQ ID NO: 32) |
| 36 | pLG038 | ttaatgcaaacgcatcaggaagggcagacctagtcacatgtagaatacgatagcaataaaaaagtctaattagaatgcaaattgat |
| | | gcaactctatgccctccaagaactccaaacctgaaagatttatgtaaaacatagtgttcgtttcaccaaaatacatataaactaca |
| | | ttaaaatagaaatttgtctcacctataagccatttagacaacagattaatgaggtttgtatcacaaatgaccacaaacgagatact |
| | | ttcgcagcttatcagtcttggactcaaaggggataaagttgcttttgttcggcaggcttcgaaactcgcgcgttcctatgattcta |
| | | tggggctgcctgagcttgcttcagccattagaggtagtattcaagataaaaacacgtttaacttgcagaaagtatcacgcagtaca |
| | | tcacctatttttgaacgtcttgatacattacctgtagataaagaaactaaatttgatttagcagacgtaactcaaccgtcttctga |
| | | aattcaactcccattgttgaaagatagcactctgaaaaaaattaaagaatttttgactttcactgaacgagctaaagaattaaagg |
| | | atgccggtcttggcgtgacatcctctatgattttatatgggccaccaggttgtggtaaaaccttgacatcaaaatatattgcatcc |
| | | tgtctaaatttaccgcttcttactgcaagatgtgactccttagtctcatcatatctggggtctacttctaaaaatatcaggcagct |
| | | atttgagtatgcaagtaaagcaccatgtgttttatttctagatgaactagattctctagcaaaggctagagatgatcagcatgagt |
| | | taggtgaactgaagagggtggtggtttctttattgcaaaatattgacaatctacctgaagaaacaatattgattgctgcaagtaat |
| | | catgaaaatcttctagatagcgcagtttggaggcgctttgagtatagaatatctattggattgcctgattttgaagtcagaaaaca |
| | | actatttgaacaatattcaaacataaaagctacatatgacgattttgttgatgaccttgcggaaatatcatcagggctaaactgct |
| | | catttatagaacaatgctgcttaagatctgagcgacatgctctggtttacaataataaacaaatcgatacccgatttttagtcgag |
| | | gctatcttagaagcgaagggagttacatttgatgaagaagataatttacttataaagattgtgaccactctcagagaatacaatcc |
| | | caaaagatttacaatacgaaagatagcaaaaatactagggctttcaaatgctaaagtgtcaaggctaactaagaactatagagaga |
| | | tattatgagtaacaaagaaagaccaataaaaataattgaggcgacacctcaagattttactgaaaaaacatataatttcggaaaga |
| | | aacaacctatccgaacagtaacaactagtctaaaaaatagactcaaacaagaagtcgatgacgttaaaaattttttccagagctca |
| | | tttaaaaaatggcccaatataccggcggtggctagagttactcttcatgaaaaagctcttgctaagtcacatcgcccatcaagcct |
| | | attaggtgataatacatgtcccgtaataggcagtgataattttggagaattacttataagtgttactgaaaaagggttagcacaac |
| | | ttcgcaaaaaaattgaaaatagcactaattctcataatgggacagtacatattgctgtaattgaaaagatcgaaccttttagtctt |
| | | aaccatgatgttatagataaaaataaatcagatagttttcttctgaaactctttgaccataaagatagaacaactaaccgcagtat |
| | | cgacaaagaattaatggaatttgcagatgaactaggaatacaaaaacccaaaaagtatgatatcagttcagatttgagtatatatg |
| | | aagtaaaagggaatgataacatcgcccaactggcaagttttattggcatacgaaaattagaacctatgccaacatttggtcttact |
| | | catacagtatcgcaatatattcctgctgaaactctagacctagatgattttcccttacctcaagaggataaacattatccactact |
| | | cggaattatagatagcggagtcgatcccaataacaacatacttaggccatggatttgggatagtttagatttagtaaaaggagaac |
| | | acgactattctcatgggaacatggttgcaagtttagcaattaatggaagatggttgaataactatgctggttttcctcaatgccaa |
| | | gctgaaattgttgatgttgcagcctttcccaaagatggtacgctcaaattgccacaattaatgaaagctatccgagaggctgtgac |
| | | cacctatccagaagtacgtgtatggaatctgtcattaggttgtcaatccccatgttctgaagacagcttctctgaattggggcatt |
| | | ttttaaatgcacttcatgatgagcatgattgtcttttcgtcgtagcatccggcaactacatttatgatcctcaacgaacctggcct |
| | | cctcaagaattaggtgggcatgacagaatatcagcccccgcagattctgttcgttcattaactgttggctcagttgcccatttaga |
| | | atcgtctgactctgtggtcaaaagatttgaaccttcatctttttctagaagaggtcccggcccagcctttatacccaaaccagaga |
| | | taaatcactttggaggtaattgtgacagtaaattaaactgtgaacataccggaatcatagctattggcgaggacaatgctctttgc |
| | | gaaagtattggcacaagtttatcagcaccgttaatctcaagtttagcggcatcactgtggcatgaactagatgttaatggttctat |
| | | ttcaccatcgcctgaacgtatcaaggcactattaattcattctgcgttaaaaaactcaccagccaaaacggagcattatgcgttta |
| | | attatcaaggatttggacgcccaagcgatcatataaatgatattattggttgcaataaaaatgagattacatttctatttgaaata |
| | | gatacccgagaaggtattgaattcagtagaacgccatttgtaataccacagtcattacgtactgaggatggaaaattcacaggtga |
| | | aattattatgacactcgtttattctccaccgcttgattatgactacccatctgaatattgccgttctaatgtggatgtgtcattcg |
| | | ggacttacacttatgatccagttaacgctaaatggatacatagcggaaaaattccacaaataaaagaaaagagtgaattatttgaa |
| | | aaggtactgatagaaaatggcttcaaatggtctccagtcaaagtttatagaaaacaatttccgcaaggtataaatggggagcaatg |
| | | gagacttaaacttgatgttcagagacgagcagagcaagagcctctatcttcacctcaacgtgctgtattggctattacgttaagat |
| | | ctcttgccaattctactacagtctacaacgaagccgaggttgaaataaataatcttggttggaaagaaactgatattgttgttcgt |
| | | gaacaaccaaaaatcaggattcgtcaaaaataagcattatggtcaccttttataggtgaccat |
| | | tta (SEQ ID NO: 33) |
| 37 | pLG039 | atagaacgatgaaggatggaagctacatattctcggtactaagatttatttttctgacacaaaatgaccatttggcgttacataat |
| | | cccaaaaaaacgtatcaaaaatctcaaaatgcgttacgattagagagtattttgattctgcgtgctcattttttgattgctgtggc |
| | | tttttgttgtgggagtgttgaatggattatttatcagaagtgttaaaaatcattgaaggtgcaacaaaggcaaatgcttcgatggc |
| | | tagtaattatgctgggttgctggcagataagctcgaacaaaaaggggaggtcaagcaagccagaatgataagagaaaggttgctta |
| | | gagctccccaggcgttggcaggagctcaaagggctggaggtgggatatctctgggctcattaccggtagatattgatagtcgactc |
| | | aacactgttgatgtcagttatcctaaattagacagttcagagatttttctgcctgcagcaatcagtacccgtgttgaagagtttat |
| | | cactaatgttcaacgttatgatgagtttgttaaagctgatgcagcattgccgagtcgtatgctcgtgtatggaaagccaggaacag |
| | | gtaagactatgttatctaagtacatcgctacccgcttagattttccacttcttacagtgcgttgcgatactttgattagtagttta |
| | | ttgggacaaaccagcaaaaatcttagacaggttttcgattatgtaatgcagaggccatcagtgctttttttagacgaatttgatgc |
| | | tttagctggagcaagaggtaatgagagagatataggtgagcttcagcgagttgtcatttcactattgcagaatatggatgcggcat |
| | | cagaggatacggtaattattgcctcaactaaccatgagcaacttctggatcctgcaatctggaggcgatttagcttcagaattcca |
| | | atgcctctgcctgacatacatcagagagagttaatttggaaaaatcgtttaaagaatatgatatgtagcgatctagatttaagtga |
| | | tttatcaagaaaatcggaaggattatccggagcaataattgaacaggtgagcttggatgcacgtagggatgcagttattgaaggtg |
| | | caagtgtgataaatcaccataaattgtataggcgtttgtatcttgctcaatcgcttatggaaggtgtaaatttaagcacttacgaa |
| | | gatgaaattcgttggttacgttctaaagataaaaaattattttctatcagagttcttgctaatttgtacaaacttacatcaagagt |
| | | aatttcaaacattctgaaggagtcaggagcatatgagcagaaggggtacacagtttagtaacgcaaaagttacaaacccaatgtta |
| | | agaatccctttttccagtagtgacttgggtgcaatagtaaacgctggcggtggggcaaaggtattggttgatgtaacagccgaata |
| | | tagacaagggctagtaagaaatttaacaaccagtaaacattatttagaatccaaactttcagagtaccctggaagcttgggtactt |
| | | tggttttcaaattaagagaccagggaatagccaaaacgcataggccgaacaaaattgctcaagaggctggattgcaaaatgccggt |
| | | catgccaaaatagatgaaatgttggttgctgctcatgccggctgttttgacgtattagagtcagtcattttacatcggaatattaa |
| | | agcgattttggctaatctaagcgcgattgagcgcattgaaccttgggatgagaataggaaggttccaggaggcactgatggtttgt |
| | | ttgaatcatcaaacatccttgtacgactatttgagtacacaggtgaagatgcaacttacaacaactatgaaaacgttatttctata |
| | | ttagaacaacacggagttaaatatgatgagattagacaaaaatgtggtcttcccttattaaggataatggatttatccccaaatga |
| | | tagatatatattagacattctcattgattacccgggtataagaacgttaattcctgaaccaaaatattcagcattcccggttagtg |
| | | taagtgattctgttggcattgaaacaaatagctttcccgtaccatcagaagaattacccattgttgctgtatttgacactggggta |
| | | agccccatcgcggcaacaattactccttgggtagtgagtagggaaacatacgtaattcctcctgatacgagttatgaacatgggac |
| | | tatggtgtcttcattgatatcaggcgctcattttttaaatgacaatcatccatggattcctgatacaaaatctaaaatccatgatg |
| | | tttgtgccttagatgaaaatggatcttatatatcagatttaattctgaggctagcagatgctgtaaataaaagaccagatataaaa |
| | | gtctggaatttgtctttgggaggcggaccatgtaatgagcagacgtttagtgattttgcgatggagttagatcggctcagcgataa |
| | | atttggtattttgtttgtagttgctgcaggtaattatgtagatgaacctatacgtacatggccaaatcctgatccgcttggaggtg |
| | | ctgatttaatttcctctcctggagagtcagtccgagcactaacagttggttcagtttctcatatggaagctaatgatgctttaagt |
| | | gaaattggaacaccgacaccatatactcgtcgtggccctgggcctgtatttactccaaagccagatataatccatgctggcggtgg |
| | | ggttcatagaccttggaatgtaggagcaagcagtttaaaggtcgtagggccagataataggctttgctctaattttggtactagtt |
| | | ttgctgctccaattgtggcaagtttagctgcgcatacatggcagagaatagccactaatacagactttaatgtttcaccatcattg |
| | | attaaagcattattaattcattccgctcaattatcttctcctgattactcgccaagtgaaagacgctatttgggagcgggaattcc |
| | | taatgaagttattgagaccttatatgatagtgatgataggtttactctgattttccaaacattcttggttcctggggtgaggtgga |
| | | gaaaggataactatcccataccatcggcacttattcaaaatggaaaatttaaaggtgagattgtaattactgctgcatatgcacca |
| | | ccactgaaccctaatgccggcagtgaatatgttcgcgcgaacgtagagctaagttttggcttaattgagaataatactataaaagg |
| | | aaaagtgcctatggaaggagaaaacggtcaatctggatatgagagagctcaaattgagcatggtggaaagtggtcaccagtaaaaa |
| | | ttcatcgcaaggcatttaataaaggaattacttcgggtaactgggctcttcaggctaaaacaacgttgagagcgaatgaaccggcc |
| | | ttaatggagcctttacctgtaactattgtagtaactttaaaatcattagatggaaacacacaagtttatgctgatggcgtaagagc |
| | | tttaaatgctaataactgggctcactatccattgcctgctcgtgtgccagtttccgtataacaactatataaatcaaacccgctgt |
| | | agcgggtttgatttatttgtgggtgtgttttataaaaataccgcccatacacaacaaaatacaa (SEQ ID NO: 34) |
| 38 | pLG040 | gggacactcaggttacataacaatgagtgatacagttcacgtagtgaaggtactatgcctaggtgtttgattacactttgatcatt |
| | | gatgatacgctcatgaaggtattactttcctgtaatgagcaggtaggtaacgatgtcgaactaaatgaatttatagtaaactttgc |
| | | aacaagagaacaagggagtatgaggggttatggctactgcagagcagatcaaagctttattgaaaagccacgttgatcgtgatgat |
| | | cagcgtttcttttctattgctttgcaggtggcagctaaggaagcaaggcaaggtcatcataagcttgctaatgatataaaaaactt |
| | | agttgataaaaatcagaaaacaacgagttctgtaggtttagttgaaaaacgacttacaccatttgttaagcagcctgatggtgatc |
| | | ttaaggggttacttgagcaaacgaacaagccagtacatcttcaagatctggtgatttctggaagcgttagggaaagattgaatcag |
| | | gttctgcttgaacaaaaacagaaagataaactttctgagtttgggcttattccaagaagaaaaattcttttcactggtcctcccgg |
| | | tactggtaagacaatgtccgcatcagtcattgctacagagttaaagctaccactttatacagtcgtcttagataatctaatcactc |
| | | gctatatgggtgaaactgcagctaagctgcgtttaatttttgaccacatacggcaaacaagagctgtatatttttttgacgagttc |
| | | gatgctataggaactcagcgtggcgctcagaatgacgttggagaaattcgtagggtcttaaattcttttttaatgtttgtagagca |
| | | ggatgattctgagagcatagttttagctgcaaccaatcatccagagcttttagatcgcgccttatatagacgatttgacgatatta |
| | | taccgttcacaaggcctgaggataatctaatcaggaatcttattgaacagagactcgctgtctttgacctcggtaatttattttgg |
| | | agtgagatcattgatagtgcttcaggtctaagtgcagcggagatcacgcgagcaagtgaagatgctgccaaagaatcagtgcttta |
| | | taatgcaaacaatattacaaccgatttgttagtaaaggctataaagcgtaggcaagaaagtagacaataagggatgaaatgactac |
| | | caacaagaggcatattttattaaacggctatgtttcccccgaaaactatcgctctaggagcaatggtcgtagtccccaagtcccag |
| | | ctcgtgatcgagcggtacatggtatatcattactaaatcagtatagccgtatattgaatcattatgatgaaagaccgaggcttccc |
| | | cctgttactgatgaaaaagggatttatgttaggctaatcagttttgaacaatgcgatcttcctatagataaaatcgataatactta |
| | | tttcaagctttgttctttagttaaatcaaataatcgtgaaactgcgattatatacattaatgaaaatgacagaactaaattcacta |
| | | aaaaaataaatgactatttgaatccatcgaaggatggtatcgagttccctagaaatcatttgttaattgatagcatacaaaatatc |
| | | gagttagcagatataacttctttctggacagataaaaaagatcttattccggatgatcacggtgttgaaaagtggtttgagctttg |
| | | gcttaagggtaataaggaggatgtgctaaatattgctcggcgtttatgcgaaagaattaatggaaggctcgggaatacttctatta |
| | | attttttcgatactactgttgttcttatccgtacgagtctatcgagattaaaagtttgtcctgaattaatatctaatttaaaagag |
| | | ataagatcagcgagggatgatatatcagttatagttaattccttacctacagaacagcatcagtgggcagaaaatgttgctgcaag |
| | | aattacgcgtaacaatgaagctgatgtttctgtttgtatattagatacaggtgttaactacaataatccactattatctagattta |
| | | ctaactcatcactggcagctgcttgggacatatcttggccacttttcgatgattataatcaaaggccttataatgaccacggttcc |
| | | agacaagcaggactatgtgtttatggagatttcctgtctgttttattgaacgatcaggacatttcgattccgtacaatatcgaatc |
| | | aggaaggatactacctccaagagctactaatgatcctaatctttatggagctattactacaggaacgtcaagtcgtctggagctgg |
| | | aaaacccgaactggcgcagagtttattcgcttgctgtgacagcagagcctaatactcttggaggccaaccgtcctcatggtctgca |
| | | gagattgacaagtttagttttggtttagaggatgatatccgcagattatttataatttctgcgggtaactctcaacctacaaattt |
| | | agaattagattattgggattcagtgactcttgctgaaattgaagatcctgctcaatcttggaatgcattaactgtaggggcgtata |
| | | ctgataaaacaacccatacagaccgcgaatatgatggttggtctcctttcgctatgtcagaagatattgcaccgtcatctcggtca |
| | | tcggtatcctggggatggaaaaagcatgccccatataagccagatttagtagaggaaggcggaaacaaacttatatcacctagccg |
| | | tgatgaaatcacaaatacaattgaattatctttgctcacaacctctggcagggcaacaaatcaattgtttgaagttaattcagata |
| | | ctagcgcagcctgtgctctagtatcaaaacatgctgctatgctaatggctcagtacccagaatattggcctgaaactattagggga |
| | | ttacttgttcatacagcaagatggactagtcgtatgcacgaacgatatagaacagaacgtgcacaggggacaccaaaatcggctaa |
| | | agaaagcttattaaggatggttggttatggagtacctaatttaaatcgagcaatgcatagtgcggaaaatgcacttacattaatat |
| | | ctcagtcggaaatcaccccatttaaaagagatggttctactgatcctacattgaatgaaatgcatctgttttcactcccttggccc |
| | | gtagaagctcttcgcttactaccaccagaaacaaatgttattttaagaatcacattgtcgtattttattgaacctaatccaagtca |
| | | aaaaggattcagacgacaatattcgtatcaatctcatggattgagatttgcagttattagacctaatcagacccttgaaaatttcc |
| | | gtgcttcgataaaccgtaatgcgaataatgaagaatacaatggacctgaaggagatgcgtcaggatggtttctggggcctcaactc |
| | | agagttagaggttcattacactcagatgcttggaaaggcagtgctgcagatttaacagagatgaatactatcgctgtctatcctgt |
| | | tggtggatggtggaaatatcgtactgcgcaggatcgctatattaacaatgttaaatatagtttattggttagcatagatgtaccag |
| | | atgagaacattgatatttacagtgagattcaaaacattattcaaattgataatcaaatagatattgaacattaaggttttatgcct |
| | | aaggtttaatgagtttgaaatgaaaaatcctttactaattggctgggtcgatgataaagacctggccatctttttatacggaaatg |
| | | atttatgttttattttactaaatttatattagaaccatcgtgcagattgtgataattccttcatactgattttttacctattatag |
| | | ttgatttttgttgcttgatatctctctttaatacaacggcgtagtac (SEQ ID NO: 35) |
| 39 | pLG041 | cggattgaatctgtttatgaaatttggctgctatcaactaatgggcgttaagttgattgtatgatctgattgataaagaaggggct |
| | | aaaaatctcctcttctttgcagcagtttactgcggtctttttgtgatgcatcagcataaaacgttttacttgtggaccctaagaaa |
| | | tggagaacattatgtcgactgtagatacctctacagcagaggaactcaatcaaggaggctcagattttattctgacttccctcgag |
| | | gctatgcgtaagaagttattggaccttacgtctcgaaatcgacttttgaatttccctatcactcaaaaagggtcttcactacgtat |
| | | tgttgatgaattaccagaacagctttatgaaaccctttgctcggaaatcccgatggaatttgctcctgtgcccgatccaactagag |
| | | cgcagctgttagagcatggctatctcaaagttgggccagatggtaaagatatacagttaagagctcatcctagcgctaaggattgg |
| | | gcgcacgtcttaggaatccgtacagattttgatttaccagatagccataaaacggttgtttctgattcagatagagagttgctgga |
| | | aaaagcccatcagtttatcttgcaatatgcccaaggccagaatggaaaattaacagggattcgttctgaatacgttaatcaaggta |
| | | tagctttgtcagcgttgaaggaggcgtgctgcttagcaggctatgaagggcttgaggattttgaacgacaggcaaaggctgggaat |
| | | gagattagtatatcttcttccaatccctctcatgacgataatcggatacaggctctgctttatccaaatgaactggaagcttgttt |
| | | gcgcgccatctatggtaaggctcaaactgctttggaggagagtggcgccaacatcttgtatttggcgttagggttccttgagtggt |
| | | atgaaagcgattcctctgaaaaggcacgttatgcaccgttatttacaattccggtgagatgtgaacgaggaaaattagatccgaag |
| | | gatggtctttacaagtttcaactttattacacgggtgaagatattttgcccaatctctctttgaaggaaaaacttcaggctgactt |
| | | tggcctcgctcttcctttgttcaatgaagaggaaactccagagtcttattttgcttcggtgaagaaggttgtagagcagcacaaac |
| | | ctaaatggtctgtgaaacgttatggtgcacttagcttgctcaattttggcaagatgatgatgtatcttgacctcgatcctgcccgc |
| | | tggccttgtgacaagcgcaatatattgtctcatgaagtaattcgtcgctttttcaccagtcagagctgtggtcaagagaattccgg |
| | | cttacctggtggcttcggtcagcatgagtactgcatcgatagttaccctgatattcatgacaaggttccactaatcgatgatgcgg |
| | | atagctcgcagcacagtgcgttgatcgatgctatccgtggtcaaaacttagtcattgagggccctcctggtagtggcaaatcacaa |
| | | acgatcaccaacttgattgcagcagctctgctcaacggtaagaaagtcctgtttgtggcagagaagatggctgcactggaggttgt |
| | | caaacgtcgcttggatcgtgcggggctaggtcaattttgcttagagttgcacagtcataaaactcataagcgcaaggtgctggatg |
| | | atattaatgctcgcttggtgagtcaggcgaccatgcctactatggaagagattgatgctcagattttgcgttatgaagatcttaag |
| | | cagcagctcaatgaatatgccgcattgatcaataaccaatgggcgcaaacaggcaaaacgatccatcagattttgagtggtgcaac |
| | | ccgttatcgtcacaaattagatattgatgcaacagcacttcatatcgaaaacctttccgggaagcagttggataaagtgacccaat |
| | | tacggctgcgtgaccaaatagtagaatttagccgcatctacaaagaggttcgtgagcaggtgggggctaatgcagaaatatatgag |
| | | cacccttggagcggtgtgaataacacacaaattcaattgtttgacagcgctcgtatagtcgatttgctacaaacttggcagacatc |
| | | aattatcgactttcaacatagctatcaagaatatgtagataagtgggcgttagaaggcgaaagccttaatacgcttcaatatattg |
| | | agcaatfggtagaagatcagtcgaatcttccagtgttgtgtggttcagagcatttcccagcacttagtgagctagattcacccgat |
| | | gccattgcacgggtgcgtcactatttagataggttcgagttgctacaaggtcattatgtggccttgagccaggttatcgagcctca |
| | | aaagctacgacttttagaacaaggacaatcgtgtgactttcctcgtgaagagctggaaaaatatggtgcagcagaggatttcactt |
| | | tacgtgatttggtcaggtggcttgaatccatccaatcaattcatgatgagttatcatctatttatgcgcaattaaacgatttcaaa |
| | | aatgctttgccagatggtattgcttcgtatatcgatgattcgcaagctggattgctattctgctctgagttgttgtcgattctggg |
| | | tgctttaccgactgagcttattagagttcgagatcctctttttgatgatgatgatatcgatgcagtattgcgcgacttaatgtgtc |
| | | aaatcgaaacattgcgtcctttaagagatggtctatctactttgtatcaattggaccagttgccttcccaagagatgctcgcgcat |
| | | gccgttgctgttatccagcaagggggattatttgcatggtttaagagtgattggcgtagtgccaaggcactgctcatggcgcaatc |
| | | tcgaaagcctgacactaagtttgctgagttaaaacgctgctcagctgatttgctcaagtattcggagctgttacaacggtttgaac |
| | | aaagtgactttggtaatcaacttggtaatgcattccgagggttggacaccgactgtgaacaactcatgttattgcgtgattggtac |
| | | aagaaggtccgagcttgttacgggataggttttggaaagcgagttgcgataggctctggattatttaacctagatggtgagattat |
| | | caaaggtgtgcatttaatcgagaaatcgcagattagctcaagattaatgactttggttaaacgggtcgagcacgaggctaagttat |
| | | taccgcgtatttctagcttgttggaagaacatgcatcttggttaggtgagcaaggtgtattgatgcaatcttaccgacaggtgcgg |
| | | aatactctcattgccttgcagggatggtttatcaatccagatatatcattagagcagatgactcattcctccgagattttgcaaaa |
| | | cataaacgatcttcagatatcccttgaaaatgactcgttacagttaggggcgtttttacaattaaccccattggcttgcggtgcgt |
| | | ataaaaataatcaactgacgttagacactattaacgacacgctgaattttgccgagcaactggttgataagataaattgcgtatcc |
| | | ttggctacccagatcagacatttggctagtggtagtgattacgatttactatgtcgtgatggtggagaaatagtttcgaaatggaa |
| | | tgaacagattaaaaatgctgagttatatgcgctagaaacaaagttagagcggagtcagtggctcaagtcgactgatggttctctta |
| | | atacattaatcgagcgcaacgaaagagcaatacagcaaccccgttggttgaacgggtgggttaactttattcgttgttacgagcag |
| | | atgcatgaaaatggattgcagcgaatctggagtgctgtacttgcgggctcgctcccgattgaaaaagttgaattgggtttagcatt |
| | | agcaattcatgaccagctggcgcgggaggttattcacatccaccctgaattgatgagagtttccggctcacagcgcaatgctttgc |
| | | agaagtcatttaaagagtacgacaaaaaactgattgaattacaacgtcagcggattgcagcaaaaattgcttgccgaaatatacca |
| | | gaagggaattctggtggtaagaaaagtgaatatacagaactagctttgatcaaaaatgagttgggtaaaaaaaccagacatattcc |
| | | aattaggcaattggttaaccgtgcatgtaatgcgctggttgcaattaaaccttgtttcatgatggggccaatgtcagcagctcatt |
| | | acctagaacctggacgaatggaatttgatctggtggtgatggacgaagcgtctcaggtgaagccagaggatgcattgggtgtcatc |
| | | gcgaggggcaagcaactagtggtcgttggtgacccgaaacagctaccaccaaccagtttctttgatcgaagtgccgacggagaaga |
| | | tgacgatgatgccgcggctttaagtgatactgacagcattttggatgctgctttgccactgtttcctatgagacgtttgcgttggc |
| | | actatcgttcacgacatgaaaagttgattgcatactctaaccgccatttttataacagtgatttggtgatattcccttccccaaat |
| | | gctgagtctccagagtatgggattaaatttacctatgtgtcaaaaggtcggttctccaatcaacacaatattgaagaagcccaagc |
| | | agttgctgaggccgtacttcatcatgcgcatcaccggccgggtgagtcactcggggtagtggccatgagttccaagcaacgcgatc |
| | | aaattgagcgcgctatcgatgaattgcgccgaaatcgccctgaatttaacgatgcaatcgatggcttacatgccatggaagagcca |
| | | ctttttgtgaaaaaccttgagaacgttcaaggggatgagcgtgatgtaatctttatttcctttacctatggaccttctgagcatgg |
| | | tggaaaggtttatcaacgctttggacctatcaattccgatgttggctggcgtcgcttgaatgtgcttttcactcgatcaaaaaaac |
| | | ggatgcatgtgtttagttcaatgcgttctgaagatgtattgacgagtgaaaccagtaaacttggtgttatttcgttgaaaggtttt |
| | | ttacagtttgccgaaagtggcaaactagattccctcacaacgcataccggcagggctccagatagtgactttgaggttgctgtaat |
| | | ggaagcactcaatcacgctgggtttgagtgtgaacctcaggtaggggttgcaggattctttattgatctagctgtgaaagatccag |
| | | gttgtcctggccgttatttaatgggcatagagtgtgatggtgcggcttatcactcagctaaatctgctcgtgatcgtgaccgtttg |
| | | cgtcaagaggttctggagcgtttgggttggagaattagccgcatttggtccactgattggttcagtaatcctgatgaggttctatc |
| | | tccgattatccgtaaactccatgagcttaaaacattggctccagacgttgttgtaccttcctatgaatatgtcgaaacgattgagt |
| | | caagcgctgaagtggcgtctgactcaattgattctcttatgcccaatttggggcttaaggagcaacttaagtattttgccacacat |
| | | gtcattgaggttgagcttcctaatgttgatgctgatcgtcgtttgttgcggcccgcaatgcttgaggctttgctggaacatcagcc |
| | | tttatcacgttccgagtttgttgaacgaatacctcattatctgcggcaagcaacagatgtatacgaagcacaacgctttcttgacc |
| | | gagtcttggcattaattgatggcgcagaggctgaagcgaatgatgcagcgtttgagtctgaattggcataattagttaaaggtaat |
| | | aagaacagtgacaactgtcgg (SEQ ID NO: 36) |
| 40 | pLG042 | gctatcctacctcagattactgggctgacctaatctatagatcaggttctctttatactttatgttagcgaaatactaagatgctt |
| | | cttagtgacgacctcttgacggtagaggacgcgtgcatagattttacaatcactgcctttcgccccctaacctaatccgcgaatga |
| | | tgcatcctgaacttgcgcgccagttcttatactcgccgtcagagcaatcaaattgctgatgctttctgcctgttcaaggcatctcc |
| | | tgtcgtcagcaatactgtgcatatttgattgatttcctcttaaggagaattagtttcatgggtattaaagcgcaggtgagtatcgc |
| | | gcacaagctggggttcacatcacaccaaaatgcagttccgctgttacgtgagcttatcttgcataatgagtccgaagagacatttc |
| | | aggatctgacactgcatctgaggaccgtgccagctgtgctcgaagaaaaaaaatggaatatcgatcgcctgcttcccggtacttca |
| | | cttgatatcagagatcgggatatcaaacttaatgctgaatggctagccgaactgactgaaagcgtactctgcgaagtcacgctaag |
| | | tttgcgccagggtgaggaagaactcttcattacccattacccgcttgaggcactggcgaaaaatgaatggggcggcagtgcaatga |
| | | ttgaattgctcccttcatttattattcctaatgatccggctgtggatcgtgtactcaaggcaacctctgatgtccttcgccgtgca |
| | | ggcaaggatgacgctcttaatggttatgaaagcaagtcgagaactcgtgtctgggaaattgcctcagctctctggactgctgtttg |
| | | caacctcaatatcagttatgcccttcccccagccagttttgaacgcaatggccagaaaattcgcactccaggagccattctggaag |
| | | gaaaagtcgcgacctgtctggatacaacattattatttgcttcagcactggaacagattggtctgaattcactgctaatgctcagt |
| | | gaaggtcatgcgtttgctggtgtctggttacaaccgcaggaattttcgcagctagtgacagatgacgtctctgcggtgcgcaaacg |
| | | tgtcgacctgaaagaaatggtcgtatttgagacaactctcgcgaccagagctcacccgccttcatttactcaggcatctgatgaag |
| | | cgttaaagcatcttaacgaggatgtttttcacgcagccattgattcccgtcgcgcgcgtatgcagaaaattcggccactggctctg |
| | | gggggcactcgccttgaagaccagtcggatgcctgcgaggttattttgcatgggtttgaggaagccccctatatccccgatgttga |
| | | tattgatatcgagacaactggcgaaaaagaagccggggggcggctggtacagtggcaacgaaaacttctggacttaaccacccgta |
| | | accgcctgttacacctgtctgaaagcgctaaaggcattcgtttgatctgtgcgaatccgggccatcttgaagataaactggctgaa |
| | | ggcaaacgcattcgcattgtcccgctccctgatctcgaaagcggcggccgcgatgccgaactttatcagcagctcacaaatgagaa |
| | | cctgcaggaagaatacgctcagattgcgctggaacgcggtgaagtcgtctcctcaatggaaaaataccgcctcgagtcatccctga |
| | | tcgacctctatcgaaaatcgaaaagtgatctcgaggaaggtggtgccaacactcttttcctcgctgttggcttccttaaatggaaa |
| | | aaatctgctgatgaccccaaaagttactctgctccactgatactgctgccgattcaacttgaccgtaaaagtgcactttcgggcgt |
| | | gaccatgcgtttgctggaagaagagccccgcttcaaccttacactgcttgagctgctgcataatgactttgctctgacaatcaacg |
| | | gcctcgatggtgatctacccaccgatgaaagtggtgttgatgtggatggtatctggaatatggtacggcgtgctgtacgcgacata |
| | | cccggtttcgaagtcacccgcgatgtcgtgattggcacattctcttttgccaaatatctgatgtggaaagatctcatcgaccgggc |
| | | acctcagctgatgcaaagtgcgctggtaaagtatcttatcgaacgcggccaggaaaatgccgttctggataagagcggagaagtca |
| | | tcaacgctcatgaactcgatgacaacatcaatacgcaggatcttttcttgccgttgcctgcagattcctcgcaaatcgccgctgtt |
| | | gtagcctctgcaaaaggcagggattttgttctggatggcccacccggtaccggtaagtcgcaaaccatagccaatatgatcgcgca |
| | | taaccttgcgctaggcaggcgcgtactttttgtcgctgaaaagaaagcggcgctggatgtggtctatcgtaggcttgaggcccagg |
| | | gactcggtgaattttgtctggaactgcactcgagcaaaacgtccaagatggattttctgaaacagctcgagcgggcatgggatgcg |
| | | cgtgatctactaaccaccgaggagtggaaggaagaagcggccaaggtgcagcacctgcgtgacaaactcaatgaggttgtccgttt |
| | | gctccatcggcgctggcccaatggcttaacactccatcaggcaatgggcacagttatcagggatgcaagtagcgccacgccgcact |
| | | ttagctggcctgcatcgactttgcattcttctgcagagatgacacagttcagagagatagtaaaacgtctggagctgaaccgtgat |
| | | gcatggaaacagcacggcgatcattttgaactcatcgcgcaggctgactggaccaatggatggcagtcctctctcattgctgcagc |
| | | aaactcattgcctgcaaccatcgatcaccttgaagacgcgaccgaggcgttactgaaggcgacgggagttactctgctctctaccg |
| | | agccggagagactgtcgcagttaacttcattctgtgaattattgtcggaagcttacggcattgatctgagtttcatgttcgcaccg |
| | | gatgccgcaagccgtatagagtcagcgaataaagccgttcacctcctgaaagagattgaagcgacaaaggctaatctgtcagttac |
| | | ctacccttgtaacagttggcagcacgttaatgtcccacagatcagaaacgcacttgacgtcgctgacaaaaaattctggttctttg |
| | | cgaccagtgcccgcaagaaagtcattggtgaagttatccgacaacactcgctaacgtcagcccccgacttatccgttgatctcccc |
| | | attgctgaaactctgcagacattgctgcaacgtctgaccgagcttaactctgctactgtatctctgccgggatgggttggactgga |
| | | taccaacgttgcacagttgcagaccaccctgcaacttgccgaatctatccgcaattcgcttggtggtttcgcttcttcgccacagc |
| | | agttggccgagatccgcactgcggtaaaaaacctgattgttgatgccaatgaccttctcggttcgcagggcgttatctccgcacta |
| | | acccggaaactgcgcacagcgatcgccgatttcaatgatgcacaggttagcttctgcaatctgataaaaccatctgaggataaacc |
| | | atcgctcccggcactgcgtgactgcgcactcaatatcctgcaacatcagtccgctcttaaagcctggagtgactggagccgtgtgc |
| | | gtgaggaagcgatttcacatggcctgcaaccagtgatcaacgcgctggtccatcttgactcaggagacatcagcgcggcagagatt |
| | | tttgaaactgcctattgccgctggtttgcatcgtggatgatcgattcagagccgctgctgcacaattttgtgccggctgagcacat |
| | | gagtgatattgaggcttaccgtacgcaaaccgatcgtctgtccaaactggcagtacgctacatccgtgcccgtttatgtggcgtca |
| | | ttcctgcaaaaaatgaggtcagcaagcagggtggttttgctctgcttaaacatgaactacagaaatcccgtcgtcataaaccggta |
| | | cgtcagatggcagcagaaatgggagatgccatggccaaacttgccccctgcatgcttatgagtccgctttcagtcgcccagttcct |
| | | gccctcggaccaggacttgtttgaccttgtgattttcgatgaagcatcgcagattgccccgtgggatgctatcggcaccatggcgc |
| | | gtggcaaacaggtggtaatcgctggcgatccccgccaaatgccgcctaccagcttttttaatcgtgcagccaatgacactgacgat |
| | | gatactgaagaagatatggaaagcattctggatgagtgtcttgctgccggcctgtataaccacagcctgagctggcattaccggag |
| | | ccgtcatgaaagcctgattaccttctccaaccatcgctactatgacagtagcctgattacgttccccgcttcggaaacaaagcaaa |
| | | gtgctgtccagtggtgcaaggttgcaggcgtctactctaaagggaaaggacgtcataatcaggccgaggcagaagcgatcgtcgct |
| | | gaaacggtgaagcgactgactgataaagagttcgttgcatcaggcagatcgataggcattatcacgctgaataccgaacagcaaaa |
| | | gctagtcagcgatctgctggaccgtgccagacagcaacaccctgaaattgaacccttcttccagtctgaactggaagaacctgttg |
| | | tggttaaaaacctcgaaacggttcagggggatgaacgcgatttgatcatactctgcatcgggtacggcccgactgaaccgggcgca |
| | | aatacaatgtcgatgaattttggaccgcttaatcgcgagggaggctggcgccgactgaatgttgccgtcacacgtgcgcggcagga |
| | | aatgatggtcttcagctcgttcgatccttcctttatcgaccttaatcggaccaacgcccgcgcggttgctgacctcaaacacttta |
| | | ttgagtttgcccagcgcggccctgtagctcttgcccaggcagtacgtgggtctgtaggcggttatgactcaccgtttgaagaggca |
| | | gtggcaaatggcctgagaagaaaaggctggcatgttgtcccgcaaattggcgtatcccgtttccgtattgatttggggatcgttca |
| | | tccggataagcctggcgactatcttgtcggtgttgaatgtgacggcgccacttaccatagcgcagcaacagcacgcgatcgcgata |
| | | aagtccggagctccatcctgcagggcctgggctggaaattactgcgcctctggtcaacagaatggtggattgataaagaaggcgca |
| | | ctcgacaggctggatgcagcaataagtcgcctgctggaggactccagagcagcggaagccgcactgattgctgaagcagaaaaaca |
| | | aaagcagattacgccagtcatcgctcccgtaaccaatgatgtcagtgatgacatactggtttctgaaactacacctgtcgctaatg |
| | | atgcggaaatatccgcgtcagtaacccctgtcatcccgcttactgccaaagtaagcgaagatgatggtaacactgggctgaggtat |
| | | gcatctttagcttctcagaataacgacaagccagtgaatgtcggtaagtatgtcgttaacgatcttcaggaatggtgcgacaggac |
| | | agatgcagaacaattctatatcgctgaatatgatgagacacttaaaaccctcattgaagcggtggtgacaagtgaatcaccggtcc |
| | | tggatacaacgcttgtgcaacgcatcgcacgtatacacggcttcactcgcgccggcagactgatacgtgaacgcgtaatggaaatt |
| | | gtggatcaacactatcaccttgcaaccgatcactcaggtgaagacttcgtctggctgtccgcagcgcaacgtgctgactggaatgt |
| | | gtttcgtttgccagccacggataacgacattcgtcaggttgacgcgatccccagtgaggaattacgcgcactggcgctgagtattg |
| | | aaggtgacaataagatacaggaaatgacccgctcgcttggcattaaacgcctgactagtcaggcaaaaaaaaggattgaatcagta |
| | | cttgatgttgtttgaaggtcaaccgtgtggaaaacctcttttagagactaacagtctgaaatatagagtcttattcgatcatcttg |
| | | agaccgaatgtattagagtcgatttctgacacctcttatcgtggttttctgcatcaccaacatcgaccagttgggcgtaatcaagg |
| | | aggacgtctggaaaacgaatctatggtcactcccgtttttgcaacaccgattttgacaataagttggtttgcttgaatctattcgg |
| | | catcagaatggaattttttttccacgcctcgatgagttccgcgcctgatgaa (SEQ ID NO: 37) |
| 41 | pLG043 | aatcccaccctgacaaaaggcctgaaaaggtcttttgtcatttcttcacagttagagccctatcgagacgcgcaaggaagagtcgc |
| | | gccagcctgtttttacgctagcgctctgctagtgacagccagctcacagggagtgagctggcagtgtttaacgtcctaccgagggg |
| | | cgtaaattgcacacagaggttaatgatggctaaagcgcactccacgccgctcaacgatattgcgattatcgctgcgaatttaaaag |
| | | accgttataaaaatggcttccctgttctgaaagaaattgtgcaaaacgcagatgacgcacaagcgtcatcattaatctttggctgg |
| | | agccctggtattgctggggcagatcaccctttattgggcgatcccgcgcttttctttatcaataatgcgccgctgacactcgaaga |
| | | tgtagaggggatcctctccattggcattggcactaaaccgggtgatgaaaatgcggtggggaaatttgggctcggtatgaaaagcc |
| | | tgttccatctcggtgaagtatttttttaccagtcctttgactggcatactgcttcggccaaatcagacgtttttaacccctgggac |
| | | agttacagatcttcttgggccgaggtgagcgagcaggataaagttcgtattgaggatgaagtccgcgcaattacccaaaatgcgtg |
| | | tgatgattatttcgttgtctgggttccgctgcgttcagagagtatctatcaggcgcgccaggatgatgaaaactttattattgtcg |
| | | gcgaagactatcgttatgaggtgcctgattttatttcagacccgggactcggggataagctcgccagcctgttaccgctgatgaaa |
| | | accttgcaggacattgagctggtcgtgaaaacagggcaggggtatcagcgtcaaatacatatctcgctgcctgaaaaggcaactcg |
| | | cccacaatttaccaatcttaatggtgctggggaatggcaaggccacattaccgttcagcgtgctggattgccggaccctcagcaaa |
| | | aattctacgtcgggcatgaggttttgctgaatgctcctgagttttctgccctgaaatcacaacgcgcctggccattcagttattca |
| | | cgagaaggtaagaagactgcggataaagcgctgcctcatgccgctgtggtgatgctggcggagaaagtaccagaaggagaggcaac |
| | | gctggcggtggaatgggcggtgtttttacctttgggtgagcaggacaccgcgcagcatgcgcagaaacaaacattctctatttctg |
| | | gtcagtactcgtatcaaattattctgcacggttactttttcatcgatgccgggcgagtgggtatccaggggctggctacactcacc |
| | | agcgccacgccgttattcaatgccccagattctccaggccaggaacaactggttcaggaatggaaccgctgtcttgctactcaggg |
| | | aacgttgccgctattaccgaaagcgcttgcctctcttatgtcgcttattcacgccagggatgcggaaaaagcggcaatttcggatg |
| | | gtgtgcgtagagctttacgcaacaataatgcctggttccactgggtaacgttgtaccatctgtgggtatgcgaactaacgcgggat |
| | | ggaagtcagtggtgtttagttgatgcgaacactcccgttcgtcgattgcctgccacaccttcaggtgaagcgcatcgcccctggga |
| | | agtgctgcccgctctggaaagtctgggtgtaacgcaccgatttatcgatgaaacgcagcagaatatctacaacgaatttaaaagta |
| | | agtggcagttgtcggagattcaggtgttgctgcatagcgtacccgaaatggtgttcactagcttaaagcttacaaattatctcaat |
| | | caattgctgaaagaactgccgattcagtcagacagctttgtgcttgacctgattgcattgctcagaaaaacgttatttagcgtgcc |
| | | gctggttgagctctcacgtaaccaggcggcgatcggagaattgatggcgttcattcgtccgacctggcgttacaggattgccattg |
| | | accgtcaggagcaggccctgtgggaaacgcttgggcgtaccgctatggataggttgttggttcctgcttttctcgataacagtaaa |
| | | gaacctgccagcgcatctctgaattgggagacggttggcagcctgctgcaagcgatgcagaaacaggcttctgccagcgataactt |
| | | tgaaaaattggtgcgggattttattggcaagctctcatctcccgatcgtcaggagctataccgtcggtttgataccttgaaggtct |
| | | ttaaggtttcacagccaacggggatatcttacctggagacgcgctgtcacttgcttgaactaaaacaaaagcgaaggatattcaaa |
| | | cttggcgggagcgctaattttggtatgggtttaagcgcattgttgcagcaggcattgcttgaaaaagaaatcgtattgatcaccaa |
| | | tgatattaaccagaccttatttggtggttctgaatattcagaagcaaaggagtgtgacagcgaaggggttatccatctgcttgagc |
| | | ttcaccctcgtctggattcgccgacaaaacgtatcgatttactcaataaaatggctgcggacggggacaaatttagcgccggagat |
| | | cggcttgtctatcgctatctgatgcacggtaattcggatgatactggtgaagctgaattgtggaaggcgggtaaagcgcatcccgt |
| | | atgggcaaaaattctttctgatgccgattcggagcaggtcaagtggactattatttcgccagaaattgagcagaatcttggactga |
| | | ctcccggattcgagaaggcgcttaggcttgatagtgtaacgccggatcatgtgatccaccgcttcaaagaaagccttgaatatctg |
| | | gagtttgatgacttatctgcagaagatgcggaagaagttctgatgcacattggccgctctatgggcgaaacaatgtggcggcagat |
| | | ggctcttcatcgtagggaaggcaaagaggggtatatatcccttgatgatcgttgtttcttgcgtggggggcgcattgaactgccca |
| | | ctgaattgaatgacaacgtgacgttcatccaacccgccagtcagccagagatgcaggatcagcagcgcaaatatctgacaatggtg |
| | | aacgccgaacatgcggtcatgctggctttatccgggccgaacccggaacgttactgcgactttatcctgcaattgttaatgcaacc |
| | | gacgaatgatttgtcttcagagagagcattcaataacctgcgccgccaaaaatggctattgcaccgcggtgtggcgatggcaccag |
| | | aaaatattctggatattagcgcggcagactatccggagatcgcgaagctgacagaagcgacgccgctcatcgctctgcttgaggat |
| | | attgctctcccagatgaggctaactgtgcgctgagttcattggtcgtgcgaggcaaggctgcgttttacaaggcgctcactgtagc |
| | | aggtacacttccactttatgcaatcggtagcagcttacgtctcactgatacgattattcttcaggccagtgacaggtcgtacgcgt |
| | | ttgagagctttgacggttggttgctcttaattgagtgtctcaaaggtgctgagtcgcttgagggtaatgaggctatcaatgcgctg |
| | | agtttttcgcatccggttacagacaagatagttgctagctaccggcatctcgttgacagcatgaatccaacccaaagtggtgaatt |
| | | gcgtaaagcactgttaagcacgctgtgtcatacccattcagatcccgccagcgtactgcgttcaatcccgctcagaacggctgctg |
| | | atacctgggcgttagccaccaatctctgttatggcgtaacgggagcagaacgtagtgctgtcctacatgacgacgactgggcgtat |
| | | ttgtccccttggctgcaggctaatgacttgtcggtagacagtactgagtccgaagggcatctcagtcatgttgagcattctgccaa |
| | | tgtcttaagggaatactttgcgccctgggaacgctgggttccacgtaaggcaattgctgcactgctggctttgctggcggggaatc |
| | | gtaaggttcataagctatgtgagagctacctggggttgcaaagttatgccctgttcgtgaatgaactgtcgcaagacagcaaaccc |
| | | ttaactaaccatgacgctcactttgcagagttaacgctcttacagtgcattgagaaatatgcctttgccgtgaaggtttacgaaga |
| | | aaacacgttgcaggttcattctctgttccaggaacgtttgaccgtggcgctggcaactgacctggatacgatctttgtgggtcagc |
| | | acggctacgctttttataccggtcaggcaccgcaaatcttcattcgccgattttccccagaccagtatacgcctcagcaacttttg |
| | | gcgattctgaaacgcagcaccagctggctgcaggaaggtatttatctgcagaaggcaaggctagacacgctctggcaatcctttga |
| | | gcaggccgagcagttggatgtgaatatcgcgcgcgtcactatcctgaacagcattgttgagcgcctgaaaacactgggccttaaaa |
| | | actctcagcttaacgttttaatgagagcctatgagagtgagcttcactctcttgctgaaagtagtgacggcaagttgctccacagc |
| | | tcgaggctcactgaaattgtctatgacattgcaaatgctatccaggatcgccctgaactgcaggctgaaatattaacggcggtcag |
| | | aaagcgtatagaggatgctcagtatcagccatcaagcgttccttttgagctgttccagaatgccgatgatgcagtagaagagttgt |
| | | tcaagctggatagcgatgcccgtcatgagcgggtacaccagaaatttatggtgaaagagcaaaacggcggattgtcattcttcaac |
| | | tgggggagagaaattaaccgctttcagagcgtgaaaaatgagcaagtcgagaatgtacatgatggctacaaaaacgatctgaaaaa |
| | | aatgctggcgctttaccagtcggataaagagcagggcgttaccggcaagttcggtctcggcttcaaaagctgtctgctggtgtctg |
| | | atcatccttacctattgtcggggcggctggcgactaaaatagcgggtggaattgtgcccgaatcctgtgatgctgaaagttataaa |
| | | caactaaaccaactcactgaaagtgccgcgacaaatggcctgtcacctactcttgtgtatttgccactgcgccagcatatgcaagc |
| | | ggaagtggtgttaaaagattttactctgtatgcaggtttgctaagtctttatgcacgtaacttgtgccagattgtcattgatgagc |
| | | atgaatggcgctgggagcctgttcagtatgcacgtattcctggtctgtcattgggcaaggttatgctgcctaacggcaagggtgct |
| | | cagtcgccagtgcgggtggtggtttaccagactgaaatcgatgatgagcgctgccatctggttttccaggtcacgcgtaggggcct |
| | | gagaagttttgatactcatattccgcgattgtggaacttgtcgccattgatgagtgatacccggcagggctttttgattaacgctg |
| | | gatttgaggttgatattggtcgacgccagttggctattgaagctgaccgtaatcggggcattatccagaaagcgggagcaaaagtt |
| | | cattcgctgctggaattactttggtgggaaacggagcataactgggaggagctggttgttgagtgggaactgagccctgaattgac |
| | | ccatactcagttctgggaaagcttctgggacgtgatgtctacaggcattagtaacgatattaacgcgatggaaaacgaaaaattgc |
| | | tacagcagctttacgaaagcgaaaatggcatcatgagcttctatcgctcatatcccgcgctgcctaacggatttaaagagcaggct |
| | | gccggactgataacgtggagcgacagagtgcgtagcgcggatgaactggtttctcgtctggcgagttcactgattcatctccctgc |
| | | gtttcaggcattgcacagtgcacagtgcctggtggcagacacgacgggaagcaaacttaaagtcgaaagtaaactgtcgcttgaat |
| | | cattaataagctcgtcgttgccggataaacagggtgttgatatccagcatctgtcaccgcgggatgctgaaaagctggcagtcgta |
| | | tttaacgaagagttcgacaagcgactgggtgaactgacaggctggcaggacaaaattgaggctttcagaaaacagctgataaacct |
| | | gcatgtgcaaacacaagcaggctctacacgcccgattagccaaattttgctcggtaacactccttgtgccgaaaaaaatgaacgga |
| | | tgatctctgggtttgcacctaccgatgccatcatttcatcatcatattctaagcaggcctgtgaatttattgtttattgcaaacgc |
| | | agaagtcagggatatgtttttgaggatttagtcaaatgggcaaagcgcaaaggcctggcggctgataatcaaaagcggcaggcatt |
| | | ttgtcgttttctgattgaaggactggaaggggagaaactggcgggtatgctgatggaagagataccaccggactggttgcttgaac |
| | | ttaagctgcgcccaggcgccttcccggcagactggcactggagcaataatgatattgcctctctcctgcaggggcggttactgact |
| | | aacattgacagaacaaaggcatgggagcgcgagattcgggagacaccggaagaatacgaaccgttggtgacaccaggtgaagccgt |
| | | acaaaaaatacacacctggtgggagaggaaccagcaggaagagttggtgaaatacaatgctcggctctaccctgaaggctggtttg |
| | | actgggaagctttaagaaatgcctctgacgatcagcgttcacgcctggcgttattgaaactcctgtatctaggctcatgccagacc |
| | | attgggcggactcaggaagagcaacacagtgccgcaattgagtattttgaggacaaaggctggtgggaaacctttatcaaccctga |
| | | tgcagcgcagcaatggctggatgtgatggacaattatctggaggattctttgtacggagatacctaccgtatctggctgcaaatat |
| | | tgcctctgtatcgtttttcaaagcatttagattcctatcgcaaactactggatatgtcggaagcgttccttgaggatattggggat |
| | | ttgctgcgaccggcatccagtttcaatctttcgggaacgggcgtgggaactgtagtcccggagttacgtgcaactctgggtactgg |
| | | ggtgaacttcatcttccgtgaattggtgcgtaataacgtatttatcgattccagcattcatcgatattgtttctctgcgccggaac |
| | | gcgtcaggcgtctgttactggcgatggagttcgacgaaatggatgttaagcaatccactgccagtgactcgcttctgctgtggacg |
| | | tttttccgcgaacatctcggtgaggaagatgcgacctttaatcattgtttcgacataccgctgcgcattttaaccagcgaagggaa |
| | | acgctcacttcgtattgagatatttggacaggatcccctggattacgtatgaaaatgatctttcagcagggccagcaggtacgaca |
| | | tgaacgctttgggctggggacgattgaactcttgcgggaaaacactgcactcattcgtttcgagtcgagttttgaagaacgtccac |
| | | tttccgaactggagccggtgcgcagtgctcaggatgctttggcagaaggaaattatgacgatctgcgtgaagttctggcgcgcagt |
| | | caggcgcttgcgatccgctccatcaatgatagttggggggtgttctctacttcacgtatcaacctgctgccgcatcagttatgggt |
| | | atgtcaccgcgtgttacggcaatggccggtacaaaagctgattgctgatgacgtagggttggggaaaaccgttgaggcggggctaa |
| | | tcctttggccgctgctggctaaaaagcgtgtgcagcgtctgttggttttagcgcctgcatcgttagtaccgcagtggcaggagcgt |
| | | ttgcggcagatgtttgatattcgtttgtccctctactccgcggaaattgatactgagcgatcagattactggaatacgcatccctg |
| | | ggtggtcgcttcattgccgacactgcgaaaagatattaatggcaggcacgagcgaatgctcaaagcagacgactgggacttgctga |
| | | tcatcgatgaagcacatcaccttaactcgctagaagattcgggggcgactcagggctatcgatttgtgcagaagcttatcgatcac |
| | | ggaaagttcgcctcacggctttttttcacagctaccccccatcgcgggaaaaattacggcttctttgctctgttgaggcttttacg |
| | | tccagacttatttgacgtgaataagccatttgaaactcagcagcatcatgttcgggatgttgtgattcgcaataataagcaaaccg |
| | | tcacgaatatggacggtgagcgtttgttcaagaccgtcaacgtgacctcacagacctatcatttttctgaggctgaacagtcattc |
| | | tatgaccggctcacacgatttattctttcagggcaggcctacgcttcgtcgctaagctctgcaaaccagcaggccgtgcaactggt |
| | | gttaacggcaatacagaaactggcggcaagttcggtagcggcaatttatgccgcaataaatgggcgtatcgccaggctcggggaaa |
| | | atcagaaaaagctgcaggcgctgaatgatgaaatgaatgccatcatgagtgattctcaggccccggatctcgatgatgcctacatt |
| | | gcgcttgaaagcgaatatgttgaaatgtctgcttcggttcaacttatgcaaaatgagctgcccatgcttgaagagctgcaggcgct |
| | | tgcggggaatgtggaatcggaaacgaaaatccagaccttgcttcatgtgctggaaaacacgtttcttaatcgcaccgtcgtattct |
| | | ttactgaatataaagcgacacaggccctgctaattaatactctgaatgctcgctttggctatggttgcgtcagctttatcaatggc |
| | | gaaggacgcctggaagggatttacaataaacagggcgtcaaaacgtcatggagtatggatcgctaccatgctgcggagcaatttaa |
| | | aagcgggcaggtacgctttattgtttgtactgaagccggtggtgaaggtattgatttgcaggacaactgttattccatgattcatg |
| | | ttgatctgccgtggaatccgatgcgtcttcaccagcgtgtagggcgactcaaccgctatggtcaaaaaaatcaggttgaagttatt |
| | | actttacgcaaccccgatactgtagagtccagaatatgggacttgttaaacagcaaaataaccacagtcatgcgttctttgggcga |
| | | cgcgatggaggaaccggaagatctgttgcagcttattcttgggatgagtgataaagtttttttcaattcactttttgctgatggcc |
| | | tgacacaaaagccagaaactctaaatacgtggttcgattctagagcagggaccttcggtggtcagtcagccgtcagcgtggttaaa |
| | | ggtcttgtaggccatgcggataagttcgagtatcagaacttagatgaggttccgaagcttgatcttatccatatgtatggtttcct |
| | | cgagaacatgctgaaattgaatggacaccgtctggacaatgataagggtgttcttagctttgtcactcccaaagactggatcacac |
| | | agtttggtatcaagaagaaatataacaatatgacttttgaacgtgttcctacagagaaatcgttagaagtgcttgggatagggcat |
| | | gtgattattaataatgctattaatcaggctgagaaatttaacgcctctacggcagtagcaaggggtatttcctcagctttactgat |
| | | ttacacattgagagaccagattactggcgatagtaatgtacaatcattttcagttgttggagtggtactggaagataatattcaaa |
| | | ttttggtcaacgctgagttagtcaataaactggcttttatatatgacaacctacctaaaggttcgacggtgattaagcttgacagt |
| | | gcattccatgttaattttgagagggatataaagcgtgctgaggccgcattagatctctttattcctgggttgaatttaccctatga |
| | | gcaagtagtatggcaacatacagcaacttttttgccacagtaaatatagcagtgttcaggatagcattgggaatgagaaaaactat |
| | | atgaaaatatggtgctgataaagtattagtactatggtcgaacggctatgcgcttatgtcatggagctgattccagagagccttga |
| | | aaacgaaagatttaattttccccccagcgtcatccgctctggcaggtgagtcgcccgagtccgagtgcccagcattttcaaatcac |
| | | cat (SEQ ID NO: 38) |
| 42 | pLG044 | tgagaacttacacaattaacgccaattttcttattccatcacgcatacgataaccgtgatcaactttttctttttgcagcacccta |
| | | taatgcaaccagtttaatttctttggatgcgtaatagtcagtgtgctgctcttgataaacagtagtcaataggcatagtccatatc |
| | | cgaaatctaacttttattaacgtacaaatagcaaaagaataaataacttagagcataggtcctcgaaaaatttttctaatgttcga |
| | | tagtcttgcttttggcgtaatgtggtaagtccaataggtgataatgtgtatagttgcattgacctagtcttgtgagattgcattta |
| | | ggatctccatcatcaattcatctttcgattcaatttcaaaaaaggttctaaaatggcgggtgcttcaatagacgctattggtgtga |
| | | ttaaccaaatcaaagacaacttaacagaccgatacgaggatggctttcctgtccttaaagagatcattcaaaatgctgacgatgcg |
| | | ggtgcgaacgaattaactattggttggagtaaaggtttctgcaatgcagaaaatgaactactcaatgcgccagcgctgttttttat |
| | | caatgatgcaccactggcagaggaacaccgtgatgccattttatcgatagcgcagagctcgaaagctacatctaaggcatcagttg |
| | | gaaagtttggtttgggaatgaaaagtttgtttcatatgggtgaggcattcttctttatgtccgatcaatggcgaattgagcattgg |
| | | gcgtcagatgttttcaatccatgggataagtatcgtgatgcatggaatgaattcggtgaaaatgacaaatgccagatcgcaacaaa |
| | | gttaaaagggtttttaagtaccgataagccttggtttgttgtttgggtcccgttgcgtacaaaagcgctagctaaagcacacaata |
| | | actacattatcatcaacaactttagtggtgatgaaaaactccctagtttctttaatcaggctcacttatcagagaaaacttctgag |
| | | attttgcctcaactcaagaatctcaaagacatcggctttttctgcgagtctgacaagggtgtgtttgatgaagtgacctccataca |
| | | gttacatgaagattcgtctcgaagctctttttgcggtgaaccgcgattaaataatggagactcttttgcagtcttctcagggaaaa |
| | | tctattcaaattcgaatgaagagcgttgtgcactggactatgcaggatgcgagcgagtcatctttgatgagcgtttaaatcaatta |
| | | aaagacgaaaatatggggtggcctaagagttatcagttcgacaagaaagcgaacttgcctgttgaggctctcgacaaagctgaaca |
| | | gcatgcttctgtaacattttcgcgttttaaaacaaaggggcaagcgtacctcaaagccaactgggctgttttccttcccttaagcc |
| | | aaaccaaggaacttgttgctgtgcctatcgagggggagtacgactacaatctctatttacacggctacttctttgttgatgctggg |
| | | cgtaaggggttgcatggccacgacaatcttgggttttctacctccctagagcatgtaaaaaatgatgagaaaaagctgcgtgaggt |
| | | ttggaacatcattctagccagtgaggggacattcaacctcgttttaccggctctaaatgagttttgtcagaagttaaggctgccac |
| | | atcaaataaaaactgttttgaccaaggctttgtacgatctcctcatagaaagatatagaaaagaagtatccaagagcgccaattgg |
| | | ataatcaatatcgatgacaagggggctgcttggtctttacttgataagaatgcccaatgcttaccgatccctcgtccagagaatag |
| | | tgattactctcgaatttggtcaacgttgcctggtttgagtaagttactggataaaaagtcactgtatgaagccacgggtaatgaat |
| | | ttttaaccgagcagaatcaacgtgatagttggaatattacgctcctggaagaagcgttaggaagtggtgttgtcaacgcattttac |
| | | agatcaatcaatattgaatatctgcttcagttccttcaactagctaaggagcagtgcacgacggaagattttgataacctgattat |
| | | tccacagttccgagaggtattgtctactcataagcttgctgaactttcattgaacaaggctcttaacacgcaagtttttgagcttg |
| | | ttagcgcacctaaaaccgtcgtactaccaattgataaagatgatcaatctatttgggaacttgtctgcaagatcattcctgcaaag |
| | | ctactgctccctaaatttctgtctactcacaataagccaattcatgacaatgtcactgaagaagagctcttcgcacttttaaccct |
| | | agtagatagctacatcaaaaaacagggtgaacgtttatcctctgatgaatcgtctgcctgtgagcgtctcattacatttgttattg |
| | | attgtgtaaatgcaagtgaggtaatccaaaaaagcgatttttatcagaagagtgggcatttaaagcttctaaaagtggaagctctt |
| | | ggttcgcaacagagcacaaaatatcgctccttaaacgaactcatagtgttaaaagaaaaataccagctgtttcttcgtggagggga |
| | | gcggaactttggtaaagggttggggaaagagctagttgcagtcgtgcctggcttggagctttgttttataagcaaggattttgaaa |
| | | ttggtggcctatatgaagggcttaccgcttgttctgaagccgcgtgcctacgactgctttccacgtacccaaatcttggttcaaat |
| | | tcggcaagactagcgctcactaaagtattctctgccgagctctctacagatgaggagaaaagaggtttccggtatttgattcacgg |
| | | cagcaaagaagacgacttgagacaaacgctttggaagccaaacagggcaactaacccagtatggatgaaaatttggcgtatgtgtc |
| | | agccagaagatttccctggatggtgtgagttagatgaagagttttctaatgctttgacaaaccagtacgaacattttattggcgtt |
| | | aaagagcagttctataaagacattatctctgaatacagaacaatactgcctgaatgcaattttgataactttgatgactgggaagt |
| | | ggagcaactgctcgcagatattggtagtcaaggagatgaaaggctatggaaagcgttgcctgtccataggacagctcataacacta |
| | | gagtcgcgattacgaccaaatgcctgatggaaggaagtgcaacagttccaagtgaatgggatgttcaccttattcaacattcagcc |
| | | attgctgaagtcgccgcttgccagcataaatgggtgaatcatggtctacctaaagagctgatcgagattgcgcttacccaatcaag |
| | | tccagctcagtattccgcatttattttggaccagctctgcgctattcgtattgcgaatgaaggaattgagcatgagttggaaggca |
| | | agataaataataccaagtggctgcgattagcgtcaggaaccgaggtttcaccggaagctattttatctttctctgccaatgagctg |
| | | cctgagtctgcaaagttctgcgagttaaaagagtcaaacatttacatgttctctcaactcgatggaaacatgtttgagcacgatca |
| | | agcacgtggtttcttgagagagtgggtcgcaaaaagtaacagctcagtttgctcgtgcattttggcagaagccgcgcaacatcaaa |
| | | gttatgtagttggtaatttttccaacatttctgctcaggtgctagaacagatttcatgcatcccgccattgatgcagctatctgca |
| | | ggctggggcttactggttgagctctaccaaagccaatatctttcagtgaatgaaaacaagcaagtgatgctatgtaaggaaacaga |
| | | accacaatcattatggtgggcgctggagcgtattgctgatgatgatattcacggtcagtcaaaggaacttcggaaagcatttttag |
| | | aagcgttgtgtaacaccgagggaggcgttgattatcttcctaaactgagatttcgcaatgagaacggaagttatgtatcgggcaac |
| | | acactggtatcgaatgttgctcaggtagttgctgataacttaatttcgccacaagaatacgcagtcattgagagttattgcagtaa |
| | | atctgctctcacgaatggtaatacgtcaaaaatcattgagttagcgggcgataatgcgccagtacttagtgattacttcgatgact |
| | | gggaagggatggttccccctgatgccatagcgacatttatagcactgtttgctaaatctggtggcgtcgagaaattggttaacaat |
| | | tatctaagacagtcaacgctggagtcgataaagcaggggtatgaggaaaagtggaactccggaaagggacgtagaggcgaattttc |
| | | acactatccgtatagctcgttatataaaagtgttgattttgaactggcaatttgtgcagaaaatgcggcgtacatgacgtcgattt |
| | | tcggcgaaagaattcaagttaaattacaaaaaacaccagattcattgcttgttcaccaagcgaacaagtccaagacgaaaaggata |
| | | gagcttcgccgagttgatacaaagaatgtatcaaaagaccaacttctccgcatgcttgccaaagctgtagaaacgatttttactga |
| | | tgtgtttggtgcagagtgtattcgatttgaaagtgaatttttgaagaggtttggtgcttcagaacaggtagatattcagattaccc |
| | | gacagatagtcttggagaatgttgtccccctacttgaaaggcttcaagtgcgagaagaaggactttgtgatttacgttcagattac |
| | | aaacgtgaacagcgtgttttggcgagcagtgatccttctgtactacaagatcgctcacgccttaacagcgtccttacgaagattaa |
| | | agagactcttgaaaataacgaaaaagtgcaatctttggtactcgaatctgtacgaaaagagatgagtaaacatttccaatactcgc |
| | | ctttcagcgtgccatttgagctgtttcaaaatgccgatgatgctttgtgtgaacttattgaaatgcagggcgactcaaccaatgta |
| | | ctgactcgatttgatgtggtttctggcagtgatgggactcttaacttctaccattgggggagagaggttaactactgtaaaagttc |
| | | atatgtcgcaggcaaaaaccaatttgaccgcgacttagaaaagatggtgagtctcaacgtttcggataagtcagatggaaaaacag |
| | | gcaagtttggactgggctttaaaagttcattgcttcttaccgacattccacgtttggtgagtggtgatatttgtgcagaaattcat |
| | | gctggcgtattaccgagtgttcctagcaaaccagtgatgacggaacttaatcaaaatgtcgatgagtataaaattggaaatcgtaa |
| | | accgacattaatccagttgcctaaatgtgataagaagcgggcagatttgaagttggttttgggacgtttcaaaagtaacgctggca |
| | | ttctcacggttttttcacgacaaattcgagaaatcaatattgatgagcagcgatttgggtggtcgggacaggctctccataatatc |
| | | cctgaagtacttgtcggtgaagtgaaactgccaacaaatacttctgaagagtctaacgttatccttcgaagtaatagagtgcttat |
| | | tatcaataccgagtccggtcagttcctttttgctttggattctaacggagttgtttctctttcgaatcgaaaaaacctaagtagct |
| | | tttgggtgttaaacccgattgacgaagatctgaaattgggtttctgcatcaacgcgccatttgcggttgatattggtcgctctcag |
| | | cttgctgtagataacggagacaatatcgatctttccagttcactcggcaaagcgttatcagctgtgttggtcaaaatgtttgcagc |
| | | ttcttcgaataattggaatgaatttgctgaagaggttggcctgggacaaagcagcacatttatcaagttttgggcgtcactttggg |
| | | atgtaataacagcccattggccagcaaggcttggagagacgaactctaaagctgaactgattaaacaaatgttcacagtggaagat |
| | | ggtctgcttgcgttttaccagagatgtgcggctcttcctcgaaatcttggtgtaaaggaagattctcttgttcaacttaaaaacgt |
| | | tgatactggagcgaataaacctttgaccaaggcatttaataccttgggaaatcacccgatacttcaacggctatataaagaccaac |
| | | aactcgtcgggcatgacacctttgagtttttgaagagtatcgattttagaccgaataatggtgcgttaactaagctcgaattgatc |
| | | gatttgattggacaggactttcctcacaatgaagtaaaccacgacagagcaagtttctatggtcgcctatttggtaaaaactttga |
| | | aaagttaatgtcgaattttgaaatgacagtgactgagaaaaaggtgttggaagagcgtttttctgaattgaagtttctcaacaaaa |
| | | ccggtgtatacgtgactgcaagcaaactgattgttgaggggagccctgagagagacttgctatccaagtttgcaccagacagcgcg |
| | | aagttaagtgaaaaatatgaccaagcatcaatggacttggttagcttcattcgtcgtgacgtaagctatgacattcattcatgggc |
| | | taagcaaataagatctgaagaatctaacaggggaggaaagcaggaagggttgtgtagcttccttgttgaaggcggctatttagcat |
| | | catcgcttctcagaaaactacagacggatcaccccgcgtttcttacaaagggacgttttgatccgagcgtattaacagaaaaatgg |
| | | cgttggagttcttcaaaggcttcggctttcattagcatttggattgatacagaggaagataaagcaaggcacgtacgacaagcgca |
| | | aaaagagtttattccgaatgtgaccaatggtgagcagatcctcgaaaacatcacgaactggtggaatcaatgtcgtaatcaaagct |
| | | taattgattatgacaaacagctctatgctcaaccaatgccttggaaggcaatgacagaggacttcgagcttgaaacgttagaggtt |
| | | cgtaaaggttggttgaagttgttctatttagggagttgccaaacattaggtttcaataacgatgtagctaatcggaatgttgtttc |
| | | ttggttcgaggacaaggggtggtgggataaactagccgttgccaatggtcctagccctgaagtatggaaagaattaatggaagaat |
| | | atcttcaaacagcacgcgttgatgagcgttatagagtttggattcaagttcttcctttgtatcgctttgctactaagctcaaggac |
| | | tatgtcgctctcttcatgaacgcttcctttattgataatcttgatgatttgttaaaaccaaatagttcaaacaagttatcaggctc |
| | | tggcatccaagtatctgagttaaaaggaacgctcggtattgggattaatttcattttacgagagttgcaaaggcaccaagttttgg |
| | | agcgtgagtattgtgaagatatccaaaagtacgcatttgttttgcctgctcgattacgaaagttactcaaaaaaatgggagcaggt |
| | | ttaagctttgacgcagagccagagaattcagagcgagcttacgactatttcgtttcggcattaaatagtgaaacccaccctcttct |
| | | taaggactttgacatcccatttagagtcttgttggctgataagcaagcgtttgaacgttgttttaattttgctctagatgagcagt |
| | | ttgaggaagtatatggataacattatacgcgttattcacccaaaattcggtgtcggtaccgtcgaattcgaaaaagctgagacatc |
| | | tcttgtccgatttgaacatggttttgaggagtgtttgaaaagtgagcttgaggcggtcgctgatcttaagtccgatcttgtttctg |
| | | gacagagtgtcgctgcctctgaacttgcgttaaaaacattagcgcactcactaaaaagtgttaatgaaaattggagtgttttttct |
| | | aaatcgaacattaatttacttcctcatcagttatgggtatgccatcgagttctaaggcaatggccaacaaatcaactgattgctga |
| | | tgatgttggtttaggtaaaacgatagaggcgggcttgattttatggccccttatcgagaggaaaagagtcaagcgtcttctgattt |
| | | tgacgccagcacctttggttgagcagtggcaccaaagaatgcttgatatgtttgatattcgtttgagtatgtatgcaccagaaaat |
| | | gatacctcgcgcgtcaattactgggactcaaacaatatggttgtcgcttctctacctacgctaaggaacgacaagaatgggcgttt |
| | | agagcggatgttaaatgctgagccgtgggatatgctcattgttgatgaggcgcaccatctaaattcaacggaagataagggtggaa |
| | | cgttaggctttcgctttatacagacgttgattgaaaatgataagtttgaatcgaagttattttttacagcgacgccgcatcgagga |
| | | aaagaacacggattcttctccttattgcagttgctgagaccggatttgttcaacgttaagcaaatggatgagcgagaaatgcgccc |
| | | atttgtgaaagatgtgttgattcgaaacaataaacaatttgttacggatatgaatggtgagaggttatttaaacctctgtctgtgt |
| | | cctcaagaacttacagttacagtgaacaagagcaacatttctatgacctcttaaccaagtttattgtatcgggtcaagcgtatgca |
| | | tcctctttgaattcaagggatcaaagagcggttatgttggttcttaccgcaatgcagaagctcgcttctagttcaattgcagctat |
| | | cgagagagctctaaaaggacggatagagaaacataaactaggtaagcaacgtcttcaggatattgaagttcaacaggctgctttat |
| | | tagaaaagcgtgaggagtcagaatcgcagtctgaaagcgagatatacagtgatgaattagcgcaattagaactggaatttattgaa |
| | | acgacaacgcgggttcaattgatggatgatgagctccctagaattatggagttgttgtctgcttgtcagaaagttggctctgaaac |
| | | aagaattttaacaatattagatatcctagaaacggagttcaaagatagaactgtcgtcttttttactgagtataaagctacgcaag |
| | | cgctattaatgggtgctttgaataaaaagtatggtgaaggctgcgttacttttattaatggtgaaaatcgtcttctgaatgtagag |
| | | aatggctcaggagtatgtgttgattatgtcaccgatagatacaatgccgcgaagcgttttaatgaaggcaaagtacgatttataat |
| | | ttctacagaggctggtggtgaagggattgatttacaacaaaattgtttttcaatgattcatgtcgacttgccttggaacccgatgc |
| | | gacttcatcaacgtgtggggaggttgaatcgatatgggcaagtcaaaaacgtagaagtaatcactcttcgaaatcctgataccgtc |
| | | gagtcaagaatctgggatttgctgaatacgaagatcgatttaatcatgcgttcggttggcggtgcgatggatgagccagaaaacct |
| | | aatggagttgatattaggtatggcggatagcacattgtttaatgagttgtttacagaagcagccaatcgtaaaaactctgaatctc |
| | | tctctgcttggtttgaccataaaacaaaaacattcggtggcgagtctgtagtgcaaaaagtgaaagacttgattggtagagcagaa |
| | | aaatttgactatcaagatcttgaggctgtaccgcgtttagatcttggagatttaaaaccgttttttactcagatgctttcatttaa |
| | | tcaaagacgttgtaagtatgatgaaaatggtggtttatcgtttttgacacctcacgcatggttggggcaatttggaaccagacgct |
| | | cgtatgagaaattgcattttgaccgcaaagctaaacagcttgattcagaagctgacatcataggctttgggcatcccatgttttca |
| | | aaagcggttaatcaaggagagcaaatccctggaagttacgcgtttcttaacggtatagagaaagatcttgtagtgtttaaggttca |
| | | agatcaggttacgggaaccgatgcatcagtaaaagtgagtattgttggactggtgctcgatgataatggcgattgtgaattggtca |
| | | aggacgaagaccttatcgggtatttaaacgagtatcttaaaatttccaatgatgttgactctaaacgtacaccagaggatttagtg |
| | | tctgttattcaaactgctaatgattatctaatggagaatgtgtcatcaattggcttaccatttaggctgcctaattctgaaccatt |
| | | aacggtattctacaaagcaagtaactaactattattctatagctgagcattacgaaaaagttcggtagtgattctggcttaatatt |
| | | tgggccgaagctaagaggtcgtt (SEQ ID NO: 39) |
| 43 | pLG045 | gtcatagtcccttacggagataattcattgaaattaatatcttatacagcacatgtaaatagccgtggtgtatttttatccaatga |
| | | atcgttacaaaaataagatgcatgcccaccctgttctgtgtgaacgctacgaccagctacggatttataccaaaagtaggaattct |
| | | atatgtcacgtattaccatcaacgttttatggttaaccgtaccaatagcgcggaagtgggcatgagcgaagtagcagatcaacagc |
| | | aattggaaactcagccagcgggtgatgacctcctgcaaggtgtcaaacgcgttctcaggcatgccgttcaggcgtacggggatggg |
| | | ttaaaggtttatcaaagcctgcaaaatctcaacgaggtgattggcacggagtacggtaatcgggtcatttatgagttgattcaaaa |
| | | tgcgcatgatgcgcatacgtccgaagaacgtgggcggatagctgtcagcctggtgcttgaaaacctttcacggggaacgctctaca |
| | | tcgctaatgatgggcgagggtttcgccatcaggatgttgaagcggtcaaaaacctggcgatcagctccaaagagattggcgaaggt |
| | | attggcaataaggggcttggatttcgcagtatcgaggcgctgacgcaatccgtgaggatctattctcgctcaaatacgaacggcaa |
| | | ggaccgatttgagggttactgtttccgtttcgcagatactgacgaaatcgcgcataatattcgcgatctcggtgttgatgacgcga |
| | | tcagcaacgaagttgccaaaacgcttccccgctatcttgtgcctgttcctctagatgatcaaccggaggatgtccgcacttttgcc |
| | | cgcaacggtttctccaccgttatcgtggcaccgttagaaactgaagcggcagttacgcttgccagaacgcaggtgaaggagctgac |
| | | caatcgcgatgttccactgatgcttttcctcgatcgtattaccgaaatcagtatcgaaattttatccccggatgagaaagccgaaa |
| | | agcgcaccatgcaacggcaggaaaaggcgctgggaagtattcctgacgcgcctgatgtcagtctctacgaagtcgatataggtcag |
| | | cggaaacgctttttagtggccagaagcaatgtcgataaagcgcgcgtgcagcaagcggtgagcgatagcttattgactgcacctca |
| | | gctaaagcgttggctgaactggcaagggataccggttgtttctgtcgccgttggcctgaacaaatcaacagtaacttctggaagac |
| | | tctacaactttttgccaatgggcactgaggccgcttcaccgatttgcggctatatcgatgcaccattttttaccgatattgacagg |
| | | cgtaacacgaacatgagtttgcagctgaaccggctgttaatggaagtggctgcggaaacctgtgccgctgctgctttgtccgtcgt |
| | | atcccgtgagctggatataggtgcatctgcggtttttgatctgtttgcctggacgggggaacatcgtcgcatgatgcaaacagcac |
| | | tggaacggaaagatacttcgctcagcaaagcccgcctgattccggtgatggctccgccaggaaaacagcaatggtcgagtcttgaa |
| | | gaagtcagtatctggccggaggtgaaatttgccatcctgaagccgaaagacgttgccagatacagtggcgcgcagttggtttctag |
| | | cgaattgaatacgccgcgcatagtgcgtttgagggagataacaaaatttccctatatgtatcagtcattagatccttcggcgcaga |
| | | cactggtgaaatgggcagaagcctttgccctttcgctggtggaacggaaattctcccctgccagttggaccaaattctatgatgat |
| | | ttggtcaccttgtttgctgcggtaaaagtgaaactcaacacacttgagaactgcctgatcctgtatgaccgccagggcaaactccg |
| | | gcccgcaggcgggcataacagtaatgaacacaatggcgtttttgtacgtcggcatgtatccagaggcgacaaaaagaaagataagc |
| | | gtaccgggattccgttgccgccagcgattgtttctcggcgctaccggtttctggatgaaaaaatcgtgcttagtgcggcgacgttc |
| | | aatgcgtttaccgtcgccgacctgataagagagtacgatccgatcaaagccctgtcagggctgaatacggccctgagtaataaggc |
| | | gacagtcagacagcgccaggatgcactattgtgggcatttgaggtctggcgcagcagtagtgtcgttgtcgatgtggagctgaaaa |
| | | aagccgatctccatattcccgtgcagtcgggttggtgtgcggcaagcaaggctatgttttcatcctcctggacgccaacagggaag |
| | | gttgtggaaagctatttaaccggcgcgatggggatctcgcctgactgccgtctggcagcgggtttgttattgattgagctgcaaga |
| | | ctggccgggcgtcgtgcaaaacagcaaaaccgactggattaaattcctccgcgtgcttggcgttgcagatggattacagccggttg |
| | | aatctaaggtaagagcgcgagcatatggcgatagttggaatagctttttacgcaatggcgacgagcatgaggggtttgatagcgac |
| | | tggagggcagaagtaaagcgggcacatataagtttctaccatcctcagacggtctatacctcggaaggaaaaacatggcgattgcc |
| | | cgggcaacttgagcacgcaacattgccagacgatctgagggagctgttgtgtacgctgattttcgcctttctgaagtcgcagacta |
| | | cggagttttttacctttgaggtcggtcgttttgagcgacagaattcgcaaacagactcccgtacgctgccaacgccgcttggcact |
| | | tttttacgcactaaagcttggcttgccagcactagctcactatctgaaggattgcattttagccgtccagatgcgtgctgggcttc |
| | | gcgggagcggcgcaataaacctccgcgtttcctagaccatttgattgagcacaacgttgatattattgaagagagtcaactagcgg |
| | | agcgcttgttttctgcgaaaattggcctacgtgattggaatcataccgggacggcgttggatcgcattaaagaactggtctacatt |
| | | gttccgcagttgaacgctggcgataaggcggatttacagcgggaatatcaacgaagctggcgtgatatcctcgacagcgacgaagc |
| | | tcttcccgacggattggacctgattgtttttcgccgtgggcagcatgaagtgctgcgcggcaacagcgatctgcctcctgcggtga |
| | | ttgtcaccagtattgcacaaaaaattgaagcacaaatgcttgcttctgcaggctacgcaatactcggtattggcctggatgagacc |
| | | gatacactcgtctcctgcctcggtgatacgggacgattttcaccccgtaagattaatgacggcggagtgcaactttacctcgatgg |
| | | taagccgttttatcccgatgagagcgatccgttgcttatctccttcgacatgaactggttaccggaaatcctggttattggtctgg |
| | | cgttactcggggaaaacttagagcggggcgttcacgccaccaaggttgataagcagctgcgcgcaatcagggtacgccgttgtaag |
| | | accctctcttttgccgtgcagggcgatgatgccaccccaacggagtcgttcgtcagctattcctggccccatgaaacgatgccgac |
| | | gctgattattgaagaggggctggtgtttaactggcagaccttagcgaagatttcccgcaacctctcacggctggtggataaccggt |
| | | tacgtttcattgaaaccttacttttgcgcctcgcagttggtcgcgataatggctcgttgagtaaaccggatgacgttaccctggct |
| | | tgggagatgaattgcgatgttcaaacgatccgtgatcattacgcccgactgcgcacggacatcactcatgtgatagacatgctact |
| | | tcctgtggtgacgtatctcaacggtattgagcttgctcaggttctcaagcgggaatatgccttatctaggtcagtatttgatgtgc |
| | | gtagttggatttcatcacatctatctgatagtgatatacctgctgaaaagctgctggacgtgtgtgaaacagcaaccgatcgggtt |
| | | gaactccgtaaaatgctgtcgtttgattttcagcaatttaacctggctctggaagcgttaggggaaacaccgctgtccaatgagga |
| | | tgctctgcgcagattttttacggcctttgtcgggcagaggcgttcacatattatcgatcggttacgccgacactatctggcgacct |
| | | ttgataccggcggagatttgtcacaatacgttcagcataaatctttgggcttcatttccttcaactctgaatggattttgacacat |
| | | gaaaccttggaaaaggagatggtggactcgcaggttgacacgcaacttttgagtgcgttaggaccggacaatggtgaagagctgtc |
| | | tgcacttaatacgttattagacgcgaatcgtaaaaatgtgcgcgaatttgccatgcaggctcagccgcgagtttccgcctggtgca |
| | | gacaaaatgatgtcccggtgaatgctcactggcagtacaacgatcctcaggcgttttgccgacagctcgaaaataagggctttctt |
| | | gatttccggctctttgagccggattcactaccggattactgcctgcgcgccgggctatggccaccaacgatgccgcccagcctaga |
| | | tcaggatgtgctgaatatcgacatgaggaaagtttcccaggaaaaagaacgcgctgagcaggcaaaacggcaacaggaacttgagc |
| | | gtcgcagtatctttttttccgggcagtcgcttgatacagccagcccgctatttgccgatcaacttcgggaactggcgagtaccgat |
| | | agtagttggcaggtgcgcagccagcacaagacgcaggccttgatggattttggcgtggtgacaatgcgtcaggcgagcggcggagg |
| | | ttgcggaaaaagaaccgggcgtgcgtatcgggagcctcgattgacacctgcacagcagcaagccatggggctggcgagcgagtggc |
| | | tggcttttcagtatctgcgcgatcgctttccggattatacggatgaaacttgctgggtatctggtaatcgggcttcgttttgcggg |
| | | ggcgaggaaggagatgattcggccgggtatgatttcatagtgaagacgccgaaagtggaatggcttttcgaagtcaaatccaccct |
| | | cgaagatggtcaggagtttgaactgactgccaatgaacttcgtgtggcaagtgcggcggctaaagacgcaagccgacgttaccgaa |
| | | tcctctacgtcccttatgtgctttcgccggatagatggtgcgttatcgaattaccaaacccgatgggcgataaaacacgcaatcac |
| | | ttcagcgttgtggggcatggatctttgcgtttgcgttttcagcggcaggagaactgacagcaaccctgctcagggaaacctgagcg |
| | | gggtttttaaatatggcctctatggataggggacactttctgcagtaaatggataataagaaagctaacgttgaagtctgattctg |
| | | ccattttccacgacagctaaatgctggatcttctttttaggatcccaacatacctagcagtaggacgtaagtatgcttgagttcat |
| | | ctcgatatccttgtttctgaatgacaggcattactatttcgtgggtgtgaaccgatgaagggggtgatgtcattggaaaataatga |
| | | ggtagtagcaaggagaagttctgctcttatcatagtgaaaaagcggtttgggaacaaatcggaactgata (SEQ ID NO: 40) |
| 44 | pLG046 | cactcaataccacacaattctcaactccgaaggacttcgtgaaacgtgagtaagcgtcaactcagctccgtctggtttacctcgtc |
| | | aggctctgtagtttaggtgttgccatggcgtataaccctgccaacagaataacttaccttactccagtcaataccgccttcgctgt |
| | | acgcttacgcttttcgctcaaactgtgtgaaaacgtttttgatcgcataaattaccaaaacagggctgaaaaccgcgctcatacgt |
| | | aaaattcggctcaactaaccagtcgaccaatttcagattttgcgtagacgcgcgcacttcagttttagtcagggttttcacacagc |
| | | ctgcgctcatggctgctttaagctaaaacaaacagatagaaagaagttacgataccctgtgaattcttgcaggcagatatcaagga |
| | | gggttcattggtagcgataaaaatgtatccggcaaaggatggggatgcttttcttattatttgcgatgaggaaaaaagtgcatttc |
| | | tgattgacggaggctacgcggaaacgttcaggcaacatattttgcctgacttacgtgagctgagttttaacggttaccggttacgt |
| | | ctggtcatggcaacacatattgattcagatcacattggtggtctcgtggacttctttcttgtaaatggacacgcagcagagcctgc |
| | | agtgattactgttgaccgcgtatggcacaacagcctcagggcgatgacgagacccgaaaataatgcacaaaaagtggattcccgag |
| | | aaatcactgactttttgagacggagatatcatgtcgaagccgataaagccaaaccgcatgaaatcagcgcgcgtcaggggagttca |
| | | ctggctgccagccttctggctggcgattatcattggaatgagggaaaagggtatcagtgtatctgcaccggtacctccattcccaa |
| | | cttgatgtgcgataacagtctaacaattctgagcccctctaaggagagaatttcagcgctctgcctgtggtggcgcagacaacttg |
| | | catcgctgggcttttcgggacggtcctcctcgagtgaggcatttgatgatgctttcgaatttttttgtaaaagggaagcatctcag |
| | | gttcctcttccgcatgtcatcaatgcaagaacaccgttgcttgagagggattatgcacgggatacctcgccaacaaatggcagttc |
| | | gatagcgttcagtctggtgctcaataagaagagaatattgatgctaggagatgcctgggcggaagaagttgtgacatctctgggtg |
| | | ccagtggggcgtcccatcattttgatatcattaaaatctcacatcacggtagtattagaaacacaagcccgaatcttttaaagatc |
| | | atagatgctcctgtgtacctgatctcaaccgacggaaaaaagcatgccagacaccctaacctggcggttctgaaagcgattgtgga |
| | | cagacctgcggcgtttacgcgaacgctctattttaactatgccaacagcgcatctgcttttatgaaaaattacctttctgcaagtg |
| | | gtgcacaattcagaatcattgaaggatcaacggattggataacactgtgagatatgctgctactgaaactgaaataaggaacgcaa |
| | | ctgtactcattgaatgcgcgggttacactggttccggaaccctgatcgcagcagacaaggtccttacggctgcacattgtgtagta |
| | | tcggatgatcctgagacaccaattacagtgacattttttggtgcggatgaagacgtctgtgtcaatgcgacaatttcagaaataga |
| | | tacatcgtgcgatgcctgtctgctaacactttctgactctgtcgacattccgcctattacacttatgacacagccggagcgagagg |
| | | gaagccaatggaaagcctttggctatccggcatcacgcaatgggccatcacattatcttcatggcactataagtcagattttacca |
| | | aggcttttccatggcgttgatatggatttgtcggtcagtgccgattgtgttctggaagagtacagtggagtttctggtgccgccat |
| | | tctatcagaaaataaatgcattgcgatggtgcgcatcaggatggatggtggactaggtgcagtaagtcttgataagttaagcggtt |
| | | tgctgattcgaaacggcctcatcccagatgacattgcatccctgccagattcatcactgtcgggtgaagttgtcctgaaccgcaca |
| | | gaatttcgcgacaactttgaatcgttcgtcctggagcacaagggacgtgcagtgcttttggaaggtagtcccggctctggtaagac |
| | | taccttctgccgccattatcagccccgtagtgagcaactcgcagtggcgggtgtctatgaatttacaccggaagacggtgctggta |
| | | cgacattcaaaattcttcctgaggtatttgccgattggctgcataaccaggtttctatactgctttcaggtaggcctgctcgcagg |
| | | gaggaaacagaaaagatcaatctgacccaaaaggtgtctgaccttctacatactttctcagattactggaagcacaaaggaaaata |
| | | tggcgtcattttcattgatgctgtgaatgaggcaagcgagtgcggggatgaggcagtatcgcgctttacagcattactgccggtga |
| | | cacttccggagaacgtcaaacttgttttcaccgcaccatcattatcatcagctggtaaggctttccggcactggctcacacctcag |
| | | gattgtatcagcctaacgcttttaagccatagggaggtgttacagctaacagctcgagagcttaaaacttccgccccttctttgtc |
| | | actactcacacgagttagtgatatagctcagggccatccactttatctccgatacattcttgggtatctgaaagcgaatccggatc |
| | | aggttaatctggagatattcccggttttcagtggcagcattgaaacctactacgaaaggctctggcaggggctggttaaggatgag |
| | | agcgctgtaaatctgctcggtattctctcgcggatgcgctggggcattgatatttcatcactgatccctgttctaacaccgcagga |
| | | acagacggtgtttgttccaacccttgaccgtattcagcatctgcttcttaatgataaatcatcagcattgtgccaccaatcatttg |
| | | cggcgtttatcaacagtaaaacggcggtaattaactcgctgctgcacggacgccttgccgacttctgccttaccagtggagagagt |
| | | tatggcctgattaatcgcgcttatcacctgctcctagcctctcacgacagacatcctgaagccgcattggtgtgcacgcaggaatg |
| | | ggctgacgcctgtatcgtcaagggggctcagccggatattctaattcacgatatccgtcagaccctgaagaacacgcttattcgtg |
| | | ccgatgcagtggcatcgattcgtctgttgctgcttttccaacgcatgaccttcagacaccattttttgtttctgcagtcagcttat |
| | | cactcaggccttgccctggctgcacttggcagaccggatgaggcccttgagcagctcataccatctggaagcctcgttgttgatgc |
| | | agttgatgcaattgtcagcgcacagactctcgcgcgtatgggaaacagtgaacacgcgctgaagctattggaaaaggtgaagtcag |
| | | ctgtcgaccaagaatttgaacgcaatcccgtcaatctatctgattttatcggcctttccctggcttgggtgagagctgagctgatg |
| | | gctggggtggttgatggccacggacgcacacgcgaggttgttgagtatttgtacggttgtgggcaagtcgttcgcgataattttga |
| | | acaatcagcgcatagtaaatcagcatatacacgcgctttttatcctcttcaggcagaaatggaagccgtgaacatagcctttaatg |
| | | accgctccgtatctttacggacggttaaagaaaagtttggtagcttaccggaaaatattcttgatctgatgctcagttcagttatg |
| | | cgggcacatgacatcattctgcaacatcagttgccgatgccccagcatgctttgcaacccgtttggtacaatctggacagattact |
| | | tcatactgatattccgtattcgaacgaaattcgttttaattcattaagtagccttatttttttcaatgcgccttctgctcttatta |
| | | tcaggatggcgggggtattttctttcgaagtagtacccgaaataacgttgctcaatgaagaaaatgagatagcagcagacagcatt |
| | | gacgttagtgaacagggacaactctggctggtgagcgcctaccttaatgaaacgcaaccctgtcccgatattaaacatccgagtca |
| | | gggatgttctgaatggctcaagacattgactgaggctattttttggtacagcgggcaggcgcgccgggcagttattgacggcaacg |
| | | atgagaaaaaagaactgcttttagtcaaggtgcagaatgatattctccctgctctttcgtactcgctggaagagcgcatggcatgg |
| | | ccgaattcatgggcaatgcctgaacagattatccccatgatttacgaagagttagtaaacatgttcggcgcatgctggcccgataa |
| | | gatatcagtgatcactgatttcattctggctcatacgcctcagcaatgtggactttattccgaggggtacaggcgtttactgaaca |
| | | gagttattcagactcttctaaatgagcatcggtttttggggcaatctgatacgacatttcaactacttgagacgttgcatgcgttt |
| | | gtttctgcttttactgagaatcggcaggagctggttcctgaattactgaatattattccagcttatattagccttgatgctcctca |
| | | gctggcacaggacacttacactgagcttttaggtgtgtcgatgggccctgactggtacaaagaagaccaatttgccctcatgacaa |
| | | ctatgctgcgcgtgataccacagcatacagacacaaatactacactttcacaagttgcaggattccttgaacatgcttcgggtgaa |
| | | atgacatttaggcgttatgttaggcaggaaaaatcacagtttattggcgaacttattcgtcgtgggaattatgcacacgggtttaa |
| | | ctattatcgtcagcagtcctgcggatcccatgaggaaatgctcacccaacttagccacccagctgcagatagccctcatccattga |
| | | aaggcatgcggttcccggggggagcgctggatgaggaacatgctgtagaatgcattgtcagtgaactgcgaaacagagtcgactgg |
| | | cggcttcgctggggacttcttgaaatattcagctttggcagtattggtaatcttgcagtgccctttgctgaacttatcaatgaatt |
| | | ttctgcagacactgaagaccttaatgaaatacccaaaaggttgcacaacattttacatggtgatgtgcctttctcagaacacagaa |
| | | attttatcaaaaatttcacagagcaccttgcagacaaccataagccactctttgctgaatttatcagtttgctatccgaagacact |
| | | agcgataacgacgttaagcctcccccctctggtgatgctaaccagaagggtactgatacctcagatgatgtggcaatgcagccagg |
| | | actttttgggaagcgttctgcgatcaatagggctgaagcctgcatggaaaatgcccgaaaagccgcagcacgcagaaacacagttc |
| | | gtgcaagtgagttagccgttgaaagcctgcatataattcaggatggtgactggtcagtctggagaaagaacaaccatctggcggaa |
| | | cttacacggacgtacatattggacaactctgcggatgcaggttcggtcattcgtgcttatgcttcgcttgtagaaaaagaacgtta |
| | | tgccccggcatgggtaattgctagtcatctcatcgaaatagcagccagtaaattctctgatcaagaagcccaagctattaaccaga |
| | | tcgtacttgaacacaaccgccacatgcttgggaataccgaagcggatgctgcgcatttttcttttcttaatgaacctgatacctca |
| | | gatgcaggtgaagaaacactctattttctgttttggctgctggaacacccactgaaattcagacgcgaacgggctctggaagtact |
| | | gaagtggcttgcatcagacgatgataagattctgggccaatgcgtgacggaggcactcgtttcagacattgcctcacgagctgaag |
| | | cactaatggcattgacagactgggtgtcagctagatctcctcagcgaatatgggactttatagttaaagagcgcagcctttttgaa |
| | | tggcttgaaggcactactgcactaagccaagtccatctcctggagcgagtaaccagcagagcgggatttgttttaagaaatgagat |
| | | tgccgcatttgagcgaccccgaaagcttttactgacatcagaagcctctggacaacggaatattccagaaaatttaccaacatggg |
| | | tgcaatccttgtcgcagacccttgccgtgatggaaaagcagggaatagatatcccagctttgcttaccttactcgaaaaacgggtt |
| | | ttacagcagagtggattggctgatatcacggtggcttttgagctggaaaagttacttgcgcgtggttttactgtgaatagaacacca |
| | | agtcaccatcgctgggagacgatggtgcgatttgcattaaaccagatcatacatgaggcggccgcacaggatgaactgcaaaacatt |
| | | gaacccttgctacgtgcctggaaccccgcgtcagaggagtgtgttgagccgtgggaggtttgtaaccgggcaaaacagattatctgc |
| | | gctgttatggaaggtagacatcagcaagcttcgggcatagaggatggctttttcttgcattatcttgatgaagtggaggtttcccga |
| | | gaaggtcaaacgcatctggtggaaatctcagcggtgttaacgacagctcataatggtcatgagagccttagaccaggtgcagaaagc |
| | | gaatttaatgcaacacagacacctgatatagagcggacgcttagtgtgcaccttacatgccagcgagtcaaaatgcagcctttgct |
| | | ttttgggggagctacgcctgccgcagtgtcgaaaaagtttatgcagatgactggaacgttgccttcagactttattcgcaggcaat |
| | | ggcgaagcgggcgttctcttagtaaaaacagatggggggaaccaataagcagaggaagtctgttactcatgaaaagaacaactacc |
| | | ctccctccaggactgggcttagcgtggtatgtcactgtcgatgggaagttgatgaatatattttcatatgccccgaggaggagata |
| | | atgaaatacagttcaatggaaacgccaaaaacgcgagaggaatttgaggctcgctgttttcacctgctcaatgcgatcaagttagg |
| | | acggtatcatggcattccgggtgaaggtaacaaagagcaggttccttttctccctaacggacgagttgatctggcaaacattgata |
| | | ccatgactcgcctctcgatgaactcgttatatgatttccactataacagggataattatccgcagtttgatctctctgaaaatgac |
| | | gagaatgaagaggctacggattgagctggccgatagaataatgtgcttggatcttagaggggcttccaaagaattagaacgctaag |
| | | gttgccaaagttgtgtacgaaaaatgattgatttggttgaacgctaaaaagaaagtgagtagcggtttgaagccaggctttcgagc |
| | | ttatataaacattctgc (SEQ ID NO: 41) |
| 45 | pLG047 | caggaagaagcattctattgacgctactatgttattagtgggcgtttgcgacagaatcaatggatagaattcacgggcgatgtagc |
| | | attttagacatctaagaagcactttagtcgataatctttcacctgttcgtctgtcaacatagatgcttgtgcgtggagtagtacgc |
| | | atacggccgagggctattgaccatagtgcattgtttgcttaacgttagtgcgtaggaaagaaataatctgggaaaagaattgaaaa |
| | | agatagaaaatattgcaacgtcgtgttaaaggcccgttttactggtacagggaaacaggcgctaggtgctggatgataatgacagg |
| | | aaatgacgatgctgaatataaggatgtatcctgcccggaatggtgatgcgtttttgctttgtgcagatagagccacattgcttatt |
| | | gatggcgggtatagttcaacgtttaacaactatattgtcgacgatctacggaaactggcttcagaggggcaagcccttgatctggt |
| | | gattaatacgcatattgatgccgatcatattggcggcatccttcgctttctatctattaacggcgcagcggcacgtcctgaaatta |
| | | tccagattaaacgcatctggcataacagtttacgcagtctgacggccccgcagactgagccggttgagcttaataatgaaattat |
| | | tttaaacacccttactcaacgcggttatttgacccccaatgaagaggggcagggcgccaaggctatcagtgcccggcagggcaata |
| | | cgctcgcctctctcattcatgacgggcaatatgactggaatgaaggcgacggattacgccgtatctcagttgagtctatgcctgga |
| | | atcaacttgcctggcgggcgcgttactgtactgacaccatcgaatacggcgctggatgcactactggtgttttggcaaaagagcct |
| | | gaggcgctttggatttaagggtgaggtgggggctgatacgctggctgaagatgcctttgaatgcggtgtgtcacacctgcaggagg |
| | | ccgtcgggaaaccaccttcgctaatttcagcaggtcgtcccaggcagcttgaagaagtttaccgacctgacacctctgtgacgaat |
| | | gccagttccattgcgacgcttgttgaacttgatggttgtcgcattttaatgctggccgattcccctgcagaagacatcgttcatca |
| | | gttgaaaattttgcaagctgagggctgttccctgctatttgatgcaatcaagatctcccatcatggcagttgcagtaatacaaatc |
| | | ctgaactgctggggcttgttgatgcaccggtgtattttatttcatccgacggcagtcgacaccagcatccagatgtggaggtgttg |
| | | acggccatcgttgacaggcctgccgctttttcccgcaccctttactttaactaccgaaccccgtcttcagactacttacaacatta |
| | | tacgacgattactggggcaccttttaccgtagaagcaggcacgtcctgctggattgagattggaaaacgccaatgatgctggatgc |
| | | ggaagtcaggcttgccacctgtaggattgcttgcgggaaagatacaggaaccggctggttgatatcacaggataaagtgctgacgg |
| | | cgcgacactgcgttgagaatgccctttttaatcaagcgcccgtgtctctgacatttaggcaggcagacacacaggtggaactgaag |
| | | gccacagtcctggatgaagatgaaaacacggacgtctgtttgctgttgcttgatgcaccgcaggatctgacccctgtacgattgag |
| | | tgaaactcgcccgttgccggggagctccttttatgcctatggatggcctcagagtaaactgggcatcgggcatcgcgtggagggaa |
| | | cgatcgcgcagatcctcgccgagccgctgctcggaatggatatagaaatagccatagagcagaatgcggtacttccccgctatgaa |
| | | gggctatctggtgcggcacttatcaccggggggaactgtacggggattttgcgggtttccattgagaatacggtgggcgtcatttc |
| | | agttgcagagatggcagcgtttctgcggcgtaacaacctgcttccggcacccgttacaccgacggagagttatgagaacaccagtg |
| | | aggcgcagcgggttgaattccggcacagttttgagcgcgttattaccttaaaacgcgggggatatctatttctggagggcgcgcac |
| | | ggtataggcaaatcgacgttttgtgcaaagtttacgcctaaagacccgacgattgagcattttgggacctatagctttaacacagg |
| | | ccgtgacggcgtgaatgcagttcagcaggctcaacctgagaccttcgttaactggttaagtatgcaggtttccctattcctgacgc |
| | | gggaacccgggcggcttatcaaaggggactactccgtactcatcaatgaagccggacaactgctgacgcgcctaggtgaagagtat |
| | | gcccgccgcaacaagacaggggtgctcttcatcgatggacttgatgaggttgataagtacgatgaggccctgcttaatcggtttac |
| | | agccctgttacccctgcagctcagtgaaggcttggtagtgatcttttctgccccgggctatacccgttattcagcacaactgggtg |
| | | tcagggtatcgcctgcggactgctgcacactgccagctctgactcaggcatcagcgcgggaatactgcagacagtcgctcaaagaa |
| | | gtaccatcgcaggggatgatcagggttatctgcgatcttgcgcaggggcatcctctgtatcttcgctatctgatcgatctggccaa |
| | | tgcgggaaaagcagaggaagagcttgctcagttaccgctcattgacggacgtatccgaaattattatgaaatgctgtgggttagcc |
| | | tgcaaaacaacccgctagtggttaatcttctggcgattatcgtgcgtttacgctggggaatttcacatgcgcagctcaccgaactg |
| | | ctcagtcttgaagagctgagcgtcctagtcagcacacttgaacgcatcagccaccttctgatgacccctggtgagacaaccattta |
| | | tcacgcctcatttgctgattttctggcagaaaaaactgtcctacgtgaagcagatattcagcagcggctgtctgcctactgtgaaa |
| | | gtcaccctgacactaggtatggccttctgaatcttatgtatcacagcctgcgctgcgacccgacccggcagatgtgggcaatcagc |
| | | cgctgcgatcagcactgggctgaccgctgtgttaccgagggggttaatccggcgttacttcttggcgatgttcgggaaacgctgaa |
| | | tgccgcattggcaagcggcagtctgacggataccgtacgccttcttctgttatcccaccggctgagctttcgctacaacacccttt |
| | | ttgcgcaatctgctttactcacagccagggcattgatccggattggccatcctcaggaagcgttgcaacacgttattcgtttcggg |
| | | cggctcagtctaccagtgacgcaagccctgcaggtggcgtttgacctgattcgtgcggataacgacagcgatgctcttgcgcttct |
| | | cagtctggcagatgactgggtggaggagcagctggcagaggtaaaaaccggtctttcttatccggaatttttacagctttatgata |
| | | tgcgtatgaatatctactttctcaaagggctggccggagacaggcgtgcggaaggagatttaaagcaatttcagctttactggatg |
| | | aacgtgattgagcaagtctgtgacgatgaggggacggtcagggggcttcgcggtcagatgtgtgcctcgttctttgcaggcatgct |
| | | gtttttccatggacgttatatttcgcttgcgaaactgagtgagaatttcacggggcccctgcaggaggtcacgcaatcgttcgtga |
| | | taacgttcatgtattaccattttctctgtgaggagtttcaggtcagtattgatccggagctgctggaccagctctttaaagacctg |
| | | acaacgctgagctgtctggaacatgaatctcctgtgtacgtagatccccggacacttgatgctatgatctcgtctggtgcccctgc |
| | | gcaaatgataagaaattttcagggggatacatcagtaccactgcaaccggtacgtttcattggtgatgataatgtgtcagcgaatg |
| | | atgtgtcgttcctggaggagatggctaaacataaaattcaggcattttgcgatccatcgtatgactgtccggcgcccgttgcgctg |
| | | acagcaactggctggatcgtaggcatggaggaattgtgtaggatggtggcatggtgtgagggggcggcaggacgttttcatttaga |
| | | gggagatgaagcagcccttgagtcggtgtggactgtcattgaaaagcaggtactgagcagcctgacatttccattatcagaccgtg |
| | | tggcatggcatgatgcctatgctcttcctgaagctattgtaccacagctttatgaacggctggcactcctgatatcgtctgttttc |
| | | ccttcccgactggacgcgcttttggcctttattgagcagcatttcccccgtcaatttgggctgtattcggaagggttccgagccac |
| | | gttactaaagattctaacactcctgagccaggtggtggatgacggtggaattcagaaccgcctttatgatctggccttccgttggt |
| | | atgagtttgtgctgggcaatctgcagaatcgccatgaacttgtgccagagttgttgcacctggtttcattatttgtccggctggat |
| | | gcgggtgaaagtgcacggcaggcttaccagcaggtgctggcattctcaatgggccccgactggtataaagaggatcagtttggtct |
| | | gatgataacagcgctcaagtcaatgagcgaggcggacgcgatccctcagcgtttgctcgcccgtattgcctgtctgctggatatgg |
| | | ctggcggtgagatgacctttcagcgttacgtgcgatatgcgcgccgtgatttcactgcggcgttgtgccagcacggtaatttctcc |
| | | caggcagccgcgtattttatgtgtcaaacatacggtacaacagctcagctttatgctgaagctacgcatggcgacatcgatcgtgt |
| | | gtcattactgaaaggaacgcgtttccccgggggcgcactagatgaacaggatgtgatcctgaacattgtgcgtttcgctgtcccga |
| | | tgtgtgactgggcgttatgctgggcattgcttgagacctaccattttggcgatgcgcgtcatcttgataattatgcagatgcctat |
| | | gctcaaatgatgatcaacatgcaggactgtcaggatgcaatggcgatgatcgcacaacggctcacgcttatttttgaagctgaact |
| | | gatgcctgggaaccggcacctgtttatgaaatacctgcgaagcgcacttcctgaggctctcagggataaaactgattttctgaacg |
| | | tttacctttcagataacaacagcgccccagcacagcagagcgagccatttgaagacgtcgcagaaacgcagcatgcaccgcctaat |
| | | gtttttgcaagggcatcgcttgcgcttgatgaggctgaaagtcaattgcacagacgtaacacgtcacaggcgcagcacaaggcaat |
| | | caatgcacttgagatgtttcagcaggagggatggtcggtatggagcgacttatcagaggagcatagacgtgcaggctccatactgc |
| | | tgaaaagcacggattcggtgtcggaggttgtgacgctgagtagggcgttaatttctgcagagcagcatacggagagctggcgtatc |
| | | gctgacaagctgattgaatggttgtctcctgcagcggatgagagtgtacaggctgagctggctgagcattcgctatcacacatgga |
| | | gatactaaccggcatgcctgttgccgtcatcgaacggtatgattttcttaacaggaaagaggatcagcatccgtcttctgcgctta |
| | | cccgtctgcttctgcatgctgttgatcatcctgtctggatgcgcagtgagaaagctgcggatatgttgctgtggctgctgcagcat |
| | | catccccattacgtatccgacgttgggcctctggcattttcaatggtttcactgaaccatccggatgtgctgtgcgggatactcga |
| | | taagctttctcaggatgatcctgggtctttatggactttgctgtcagcacatctggatgtggcagagacaaaaaaatcctgctgtc |
| | | atgctggccggctcgccacattagggcgaattgcgagacgggctgcatccttggggaacgcgagtgctgctgaggcgctagcgtta |
| | | ttgcatgacggggaagtacgccagcccttgcaggaaaaaatcgcacagcagagtccagcgtgtccaaaatgggctgagataattgc |
| | | ttttcagtggcgacagttagcggatgccgggctggttgacggcagcctgtcagagagggcatttgctgtgctgtgtgaggcgtgtc |
| | | atcccttcgggtgggaaacagtagaggctcttgaagaacttttggcgacgggcatgagcggaagcacggcctggaacggccgatgg |
| | | gaggcaaaacttcgctttgccttacaggtagcacttatgtccgttctggacgatgcacagtgccttcaggctgaggctattttccg |
| | | tatctgtaatcctgagccgactgacacattcagaattacgcatttttcatcgcctggtaagcaatggctcaaccagttgatgcagg |
| | | ggaaggttaaattttcacctattgctgacagccagctctatctcgatttttacgagaggcggaatattaacggcgtactcgttctg |
| | | ttgaggctgacggcttatttctaccgtgacggggtagatgctccctgcttatccggacgttttcctgcaaccgctcttgccacatc |
| | | tgtgcgggcaggccaactggacacatgcgtgaatgttcaagcgacgcctgcatattttggcagtttcacgccagcaattccttctc |
| | | aagggctaataacgctcactagggctctttcgcatcattttaaacgagctagttggcgaaaggggcgggatgttgagagtcagggg |
| | | ggcgcgcctctggaagaagggtgttatttatccattaaacgggacgcgttcagactcccgccgggaataagggttgtatgggtttg |
| | | tgaattcaacaacgaaccgattgcgcttatgaacgccgctggcgcactgaagattcactaggaagaatatgaatataccgttaacg |
| | | cgaagtgaattcgagcaccgacttcatctgcttgagaatcattcaaaaacgggtcggctcatgctggcagagggggtatccggtga |
| | | gagtttgcttaaagtcaggcgactgccaaacggccggattgattttctctccgtggatgaaactgcccgtcttcaggcgaatatga |
| | | tggagtggatgaagtcgattcccctgccgaacataccgaacgatgagggcactccctaaacttaagtatcgagttaatcctagtag |
| | | aaggggatgtgaaaagatacctttgaaaggtgcgaggtcaatggaacaactttcagagatttatctcttatctgaatgttcatcac |
| | | ggagctgcgttgtagtggccccgaaaaaactcactatagagaacggtctaggagaagactgtaaaagcatttgcttgcgttaattcg |
| | | (SEQ ID NO: 42) |
| 46 | pLG048 | gaaatttcgcgacagagatccttaacggtgcgtcgagcttcgacggaattcagaataatgatggtctggtgttcggtgaatcgtgc |
| | | tttgcgcatggcgatctcctatcagaacaaaaccagtatgccggatgatctctaaaagtgaatggaccgatatgcagggatgctta |
| | | cagtgggtcttcgacctttataagcatagtaaagaatagaatatgccaatgtacgataatctgtgcactctattacctgcgcaaaa |
| | | aagtacaccagaattgtttgtctggtttggcaaattgagatcattaggcggcatagcgaatgactttaaatgaaaagcccgattca |
| | | tcaataaagattgttaaaacaaaaaccttgcccccagcagagggcgagcgccgggcaatgcgtggctatatgggccaatatgaaag |
| | | agccggtgcagccatttatgctgaattagagcgtgggcaattggagtggataggcgtagcggaccgcagtgcgggtatcgttgatg |
| | | atttagtacttggatttaatggccttatcgttgggcaccagttcaaaacgtcccgtttccctggtacatttacagtacagacactc |
| | | ttagtagggtctgatggtctgcttaagccattagtttgcgcctggcaaaatctttgtagtgctaacccaacgtctcaggtagaaat |
| | | tcgtttagttgtcaacgattatccatcagttaacgacgctcccggaatggaagctccagctcatagcgctgccttccttgatgagt |
| | | ttgaacattatcccaaacgcacgcttgaggaatggcgctacagtaactggggccgtttagtcgaaatattatttcaacattcctgc |
| | | ctaggtgacgatgatttcgagagattttttcatgcgttgcgcataattcatggttctgcagcagattttatacaattccataaact |
| | | cagtgcagaacaagcgagactggcgtctgatatagcaaaaatattacctcgactggtctccgataaacgagatagggatcgatggt |
| | | cctgtgaagaactattatatgaactagggtggaaagatcccaccaaaacacgccacttacatcgttttcccatcggtgctcacgtc |
| | | caacgcaaccgcgatacggaactacaacttctccagacgatacgcaacacaatccagggctatgtggcattgattgggcctccagg |
| | | ttcggggaaatcgaccttgctacagacaaccctagctaccgagtataacactcgggtcgtgcgctatctggctttcataccgggcg |
| | | ctgcgcaaggtgtagggcgcggggaagctgatgatttcttcgaagacatttctgcccagttacgcagcagcgggctgcctggactt |
| | | cgccttcgagacagcagccaatttgaaaggcgcgaacaattcggtgaactgctcaaacaagctggcgagcgttatcaacgtgatac |
| | | agtaagaaccatcattattgttgatgggctggatcatatcccccgcgaagaactaccagcccattcgctgttaggggaattgccgc |
| | | tgcctgcagccatccctttgggcgtgacatttatacttggcacccagcgactggaactcaggcatctcaaacccgcagtacaggaa |
| | | caggctgggcatccggatcgtctcgtaacaatgcatccacttgagagagtggcggtcgccaggatggcagacgttttaggtcttga |
| | | ttcaaccatttcgcgtgtaaaactttatgaacttagccgcggtcatccgctggcggccaattatctcattaaggcactgttatcgg |
| | | ctgatgaacaggacatatcatgcatcctcgccggagggatggaatttaatggcgatattgaatcagtttacgcatctgcctggaga |
| | | gaaatcgcaaacgaccctgatgttatgcatgtactgggtttcattgcccgtgtcgaagctccgatgccgctgaaattgctggcaac |
| | | aatcgtagatgctcaggcgatagagcgtaccttaaagaccgtccggcatttactcaaggaaacctcaaaggggtggactgtattcc |
| | | ataacagcttccgtctatttgtgctctccaaaccaaagataacactgggcagtatagatgaaacctattcacaacatatttatcgt |
| | | gaattagctaaactatctcgtcatgcaccagaacattcattacagtcctggctaacactgcgctatctcgcccggtcaggagagcg |
| | | tgatgaacttctggcactcgcaactccagcatattttcgacaccagtttgcacatggacgttcctgttcagagattgatgcggaca |
| | | ttcacttggctctgattgctgcgcgttccacgtatgatggtgtaattgccacacggttattactttgccgtgatgagatatccaga |
| | | cgaactcaagcactggagtatgccaatgaacttccgcgcgcgatgttaaaagttggcgatattgatgcggcgatctctttcgtcca |
| | | ggactttcccaatgcgggctatgaagttgttgaccttcttttggaacagggtgattttgaccgcgcgaaagaactgtttgagcacc |
| | | ttgagccattatctcaattgcatacccccagattcgagcactatggggattcgcataatctacaagaattcaaaaaatgggcaaaa |
| | | cgagttgttcacttccgcgacgctgagcaaattaagcaggcaatagactatttgaccgttgaggggtttaaacacgccacaagtgt |
| | | atcaaccgatgaaaatatttcctctattcgcgaacagttaaagtggacagtggtcgaggcaattgttaactggcaatcagacgtta |
| | | atattcaggatacctgcaatcagtatggcattcatgtgcaagagataccggttttgatgactcaggctggatttattgctagagac |
| | | agaggaaataacaccttagcatcggaattatttaagactgccatggcattgtctgattttaatgatgtttctaatggggggcgaag |
| | | atcgattgcattattttatgccacatcaggctgcaccgatctggcttcaaaattattcgaaaacctttttgcgcctgcaatttcga |
| | | tgggagacaatgaattagaatcaacaaaagcactgacgcttgcagccatggaacatgcgcaactttgcgttttgctcggcaaatcc |
| | | ttgcccgacgtagtcacctcaacacacgctatcttacgaccgctgcagacacatgcttcagaaacgggacgcttgttggggctgtc |
| | | cataataaatgcctcatgtattccttctggaaatattaaaatggtctgtcgcatggtgatgagatatgtaatgcaactcaatagct |
| | | attctggaaacgatacctatcaggctcaattggcattgacagctacatcaccactgatttgtacattaattaaaatttctgcgctg |
| | | tgtggtaaggttgaatattattcagtaataaatgaaattgataatgcaatgcctgctttaatattaaaaggcaatacactactccg |
| | | gcgtgaaatagcattggcaatgtatcaggctgacggtgaccgtgaaagggcggccgccagatttgagcctatggtaaacgagttgg |
| | | tagaaaatacacctagcgagcaactcgagactctgtcagttctggcaaacagctttgctgcaattggcgatgttgaccgggcacta |
| | | aacttacttgcttcgatacatgaccactgtttaggctacgctctggcagcgcgtaaggaccctttatactctgtttggaaagacat |
| | | attgattttggccaatgcggcagacccagaacaccgtgctcaacgaataggtcagttgatacgacaggttgatggtatgaaggaaa |
| | | ccgagggagcatctgccgcatatcgtttgacagaagtgttaatcaatgaagcaatgcgtatgaatgcgcacagtggttataccgtg |
| | | gcacagaaactcagcaactgggggctgattccatggccaaatcaggtaaatgaactggtaattggtatgctagatcgccgtcctga |
| | | aatggtgtttctctgtacacaaatttggtgcgggctatgccttccattctacattgaaccctattatcgtgaccctacacatgtag |
| | | gcaattatattgacgttgctgcaaatgcagcggggccttcatcaattgccaaactggtatcaattctattaccggcaatccaggtt |
| | | catagtcgagctcacgagcgactcacgctaataaatcgcctgagcaaggcggcattaagacacggttataccgataaccaacttga |
| | | taatgccattactcgatggacttcagaggcccccgaagcccgccgctcctacacgccacaaacgtacgacgaagcttcaacccttg |
| | | acgaacttcaacaggcatttgaatcaaatgattccgaacctgagtatcatgcgccttatcgtttttgtgagcttgcagagtccgcc |
| | | gcattagacaaggtggtgaaaatgtatgagtgctggcattgcctgcagtcggatgcacgttgtcgttttttggttgcagagcggct |
| | | agttaatgcgggggacacgacgttagccagaaaattagttgatgattacgataccagtagtgaccgggagatgtcatggagccaat |
| | | ggttaggaggaaatcgattccgtctcttccacgcgcgtaagctactcgatggagcagcaattcatcatgaagcatatgaagacttc |
| | | atcagttcaattgtggctgggaaagagagcaccatgtcgttgctaacagatatggcagacattcttcctgtgatctgtgagtcgcc |
| | | agactggcccgccgtctggtctatcctggcagagcagatgtctttcactcgcgaacaccgtattggtgaacttttcgaatttggaa |
| | | atgaaaatatgaccgacgaagagttacttgcggaattgctccatttttcattacgattgcctatcaccgaagctcgacgacacgca |
| | | gagaaaactgcactaattctggcggtacattcaacaggagggcaaatcgtatttgagaacaccataacacgactcctgaacggcac |
| | | ccttgatgaaccattccaggcattgcaaattttgcttttgctaaaacagaaccactttgctgctaaatttggtgatttagtctctg |
| | | gccttacgaatcatcgtgatgtagctgttgctgaagctgcgtgcttgttagcacaatattggcagctacctgtatcgattgatttt |
| | | catccgttgccgttgacctatcgattggcactcgacggagaccctgatcatgaaaatgctctgttagatcctgtgagtggggcaat |
| | | gcgtattgaagtcgacttaggatggacacaaatgcttcgtcccgttgcacggagacttgcagagtttgctgattgtgacgaaatga |
| | | acatacgccagcgtgccgcaacgtttattcagcaatggggagggctggcagcctttggccctggagcaacaaaaaaaatcgaatct |
| | | cagttacgcacactctcaatgcaaatcacctatcttaagccccatgcttacattggcatactggcacttcgtcatgtcgctggaga |
| | | gctgagcttggcaggcttgctctcgccaagggataaaccatcgctactggaacaaatggatgcagtacttccgccaactcctcgcc |
| | | ctgaaatgcaaatccggccaactggcattaggcgaccgcttaaagtcaaggatgccccgtggagtgaagctgaagaaatgtggaca |
| | | aatttggttgacgaggatgttaaaccctggataggtcgtgccgacgaattcgtaatagccgaggtttcacaattcaaaatgcatga |
| | | tacccggcgtgctgaatatcaggtctatcgtattagcgcacctcaaattcatatttctgatgccaaattcatggcatggtatcaaa |
| | | gtttgcccgctgtcgtttggctgggaaaaatgatcccacttgacgaagacctcgcaccgacaatagtcaggcgtgtagtaagctcc |
| | | atcgggacaatgtcttcgccgggatatgccattgcattatgtcctaatatccagatgcatctgggatggcatgaatgctgcgagat |
| | | gcctaatatttataccgaccagaactcaacaatcgtagcaagattagtgaactggcgagacgccgggccagtggatattgatgatg |
| | | attatatatggggggaaggttgctatctgacgctttccaatgcaggcctgatacaagtcaagactctgttcggcgaattcaccgtg |
| | | cgtaatttcgcaagcagggctgttcggcaattgcgacaaggcgaagcgcaaatgataaagacagctcagaatcagttcccgatact |
| | | gtagcgagacgatttcacaacacggttcgattacctgacttctccaaccatggtctgaagaagtcagggagtgtagatcatgccgg |
| | | cattctgtttctgaatggcgcaggatttcgggtcagggtcaccacaacaggcttgtccttttct (SEQ ID NO: 43) |
| 47 | pLG049 | acaattttttgccataagacgctttcctgaaactcttctcattctcagcaggaaagcgttctcttctcaatactctctggttatag |
| | | agtattaaaaaataaggagttataatccttgtagcccaactgacataaggacgatgctcaatgtctgacagcctgcttgttcgcac |
| | | cagtagagatggcgatcagtttcattatctttgggcggctcgccgcgcccttcgactactggaacctcagtcaactcttgttgccc |
| | | tgaccattgaaggggcatcaacgacggaaatgggctctcagccagtggttgaggatggggaggagctgattgatattgctgaatat |
| | | tacggcagtaacgagctcgcaacagcaacaactgttcgttatatgcagctaaagcattcaacaatgcactcagatactccatttcc |
| | | ccctagtgggttacaaaaaaccatcgaaggttttgcaacccgttataaggcacttatacaaaaaataccggtagaaacgttacgca |
| | | ctaaactcgagttctggtttgtgacgaaccgtccagtcagtagcagcttcagtgaagcgatcaatgatgccgcgaaccaacacgtt |
| | | acacgccatccacatgatctggcgaaacttgagaaatttaccgggcttcaaggcgctgagttatcgatattctgccagcttttaca |
| | | tatagaaggtcagcaggacgatttatggagtcagcggaatatcctgctaagagaatcagcgggatatctccccgacctggatactg |
| | | aagcccctctgaaattaaaagagctggttaacagaaaagcgttaaccgaaagcgccgcaaatccttccattaccagaatggatgtg |
| | | ttgcgtgctttgggggtggatgaaacagatctttttcctgcgccctgtcgtattgaaagaatagaaaattccgtctcaagaactca |
| | | agaggcgacgctggttcaacgtgttgttgaagcattcggcgcacctgtgatcatccatgccgatgccggtgtggggaaatcaattt |
| | | tctctactcatatagaggagcatcttcccactggttctgttagcatcttatatgactgtttcggactgggtcagtaccgtaacgcg |
| | | tcttcctaccgccaccaccatcgtacagcattggttcagatggctaatgaaatggcatctcgtggtctctgtcatccattgatccc |
| | | aaatgctggtactggcatatcccagtatatgcgtgcgtttctgcatcgcctttctcagagcatttcaatactccgggcctctgagc |
| | | ccttggccgtattgtgtattattattgatgctgcggacaatgcacagatggcggcggaagaaatcggtgaaacgcgttcttttatc |
| | | aaagatttaattagagaaaagcttcctgatggagtctgccttgttgcactttgccgaccttatagacgggaattacttgatccacc |
| | | tcctgaagcactcacattatccctacaaacttttaatcgcgatgagacagccgctcatcttcaccaaaaatttccagatgccagcg |
| | | aaagtgatgttgacgagttccatcgtctaagctcttgcaacccccgggttcaggctctgtcattatcacaaaatcttccactgaac |
| | | gacacattgagacttttggggccaaatcccaaaacggtagaagatactattggtgaagtgctggaaaaatccattgctcgcttacg |
| | | tgatacagccggaatatctgaacgtgctcaaattgatacgatttgttccgcactggcaatattgcgtccattaattccattatctg |
| | | tgctatctgccatttccggagtagctggttctgctattaaaagtttcgcacttgatctgggacgcccgttaatcgttagtggcgag |
| | | actattcagttctttgatgaaccggccgaaacatggtttcagaggcgctttaggccatcggccgctgatctgcatcagtttattac |
| | | taaactgagaccactaacaaaagatagttcctatgcagcatcagttttacctgcattgatgctggaaggaaaccagctttctgaac |
| | | tgatcgagctagcgatatcctcacaagctctgcctgaaaccagcgcggttgaacgcagggacatagaacttcaaagattacagttt |
| | | gcgttaaaagcagccttacgcacaggtcgataccaggatgcggctaaactggcactgaaagctggtggagaatgcgcgggtgacaa |
| | | caggcaaagagtcctgctgagggacaatatcgatctggcagcaaaatttgtgggaagcaacggcgttcaggaactggtttcccgta |
| | | acgcatttccagatactggctggcctggctccagaaatgcttattatgccgcaatactttccgaatatcctgaactctcaggagag |
| | | gcccgcagtcgccttcgactcaccatggagtggttaacaaactggagtcaattaccagatgatgagcggagcaggcaaaatgttac |
| | | cgatcaggacagagcggtaatgctcattgcctgcctgaatattcatggcgcggaagcggcagcaagggagctcagaaggtggcggc |
| | | ctcgaaaactatcttttgacgctggaaaaattgttgccatgcagttactggcccacgcccgttatgatgaacttgatcagttggct |
| | | attgcggctggaaacgatatcagcctggttatgggaattgtactggaagcaagaaaacttcaccgtccagtcgctgaacaagcaat |
| | | cagaagaacctggcgcttgttaaaaagtcagcgagtcagcattaaagacagaaaccacgctaataaccagacaatagcagcaatca |
| | | ctggcatggttgaaatggcgcttatccaatctgtttgtactgaatcagaaagcatccagttgttggatcgttatttaccaaaggtt |
| | | cccccctatgctctgacttctgagtatagtaaagaaagagttgcttacgtccgggcatatgctctgcaggcaaacctgatgggctc |
| | | tcaattagcgcttagcgatttagcctccacagaggttaaaaaagaacttatggctgaaaaacgccacggcgaatctgatgacctgc |
| | | gtcaactgaagcagtacagcggagtattaatcccttggtataatttatgggccaaagtaattcttggtaaaacaaggaaagcagac |
| | | ttagaaagtgagctaagtgatactcaaaaagaatcgacggctattaaaggtcattcttactctgagcattcattatcatcaaatga |
| | | gatcgcaaatgtatggtttgatattctgatcgaagcaggtaatgtatcaaaagacgatgtggaaaacatcatcaaatggagtcagc |
| | | ataaagggaatagagtattcacaccaacgcttcaccgtttcagttctgtatgtgcagagatttcagggcttggagagctttcatat |
| | | cacttcgcagaacttgccttatctttatggagggatgagcactctgatgctcagatcaaagctgacggctatatagacctttcccg |
| | | ttcactcatttcacttgatgaaccagaagctaaagaatactttaaccaagcgattgaagttacaaataagttaggcgatgaaaatt |
| | | taagtcgatgggaagcgatacttgatcttgctgaatatgttgctggtaaaacgcaagtccctcctgaaatttcctataaactagcc |
| | | cgatgtgcggaactaaccagagaatatgttgatcgtgataaacattttgcatggagtgatactgttgagattttggctgagttatg |
| | | tccatcttcagccctagcaataataagtcgttggcgtgaccgtacatttggcaatcatagaagcatactggcatggaccattgagc |
| | | atcttgtaaagaaaaataaaattaatgcactcgatgcacttcctttaatcacatttgagaatgattggcataaatgcgacttgctt |
| | | gattcagttttatcctcgtgtactgatgacaaagataagatcatggcattcgaagtggtttaccactatacaaaatttaacgtaca |
| | | aaatatccaaaatcttaaaaagctggatgctatttctacatcattaggtattgaacacacagaactgaaagaaagaatttcaggtc |
| | | tacaacatactgagacggtttcaaaaaaatccagtctctcatcgaatgataatgagcaaggccatgaccaggaatgggagtccatt |
| | | tttaaagattgtgatttatcgtctattgatggtattagtgcagcatacgaaaaatttcgtaatgttcctgaattctattccaaaga |
| | | aaccttcatcaagaaagcaataagccgagttaagacgggcaaagaatgtagtttcattactgccattggtgctatatttcactggg |
| | | ggctttatgattttaaatatattcttgaatctatacccgacgaatggacatctcgtttaagcattaaaaccaccctggcaggttta |
| | | ataaaagaatattgccaacgcttctgtatgcgaatcagaaaaagtcgcgtttacgagatttttcccttcagtctggccagcaggct |
| | | ttctggtataagtgaaaaagagattttcggtattaccctggaggccattgcagaatcgccagagcccgcaaactctgaccgtttat |
| | | ttagccttcctggccttcttgttagtaaactggagagtaatgaagcgttagatgtattatcttatgccttggatttattcgacgag |
| | | gtgctaaaagatgaggatggtgacggcccatggaacgagaaattatctccgccaactcatgtagaggattcacttgcaggctatat |
| | | ttgggcgcggctgggttctccggaggcggaaatgcgctggcaggcagcacatgcggttctggcactatgtcgaatgagtcgtacat |
| | | gcgttatacaaggaattttccagcacgcaataaatgctaccactttacctttttgtgatcgcaatctgcccttttataccctccat |
| | | gctcaattgtggttgatgatcgctgctgcaagggttgcgctggatgatggaaaatcgctgattcccaatattggttatttctacca |
| | | ttatgccactactgatcagccacatgtattaatccgtcattttgctgccagaactttacttgcactgcatgatagcgacctgatct |
| | | ctatcccagcacaagaagagaataaactccgaaatataaaccagtctacgactctccctgtgcttgataaggttgaagatcataga |
| | | ggtgaagattcatatacttttggtatcgactttggcccttactggctaaaacctctgggacgttgtttcggtgtatctcaaaaaca |
| | | gttagaacctgaaatgcttcgcattattcgtgatgttcttggttttaaaggtagccgcaactgggatgaggatgagcgtaataaac |
| | | gacgctattatcaagacagagataatcatcacagtcatggttcctatccacgggtcgatgactaccatttttacttgtcataccat |
| | | gcaatgtttatgaccgctgggcagttattagcgacaaaaccattagttggtagtgactacgacgatgtcgaggatgttttccagga |
| | | ctggttaagaagacatgatatttctcggaacgatcatcgctggctcgccgatcggagagatattccccccaaagagcgctccagtt |
| | | ggcttaatagcagttctgacaatagggatgaatggctagcgtcaatctctgaaaatgtatttaacgaaacactatgtcccagcccc |
| | | ggactattaacgctatggggacgttggtctgacgtttgttcagatcgaaaagaatctattattgtccattctgcgttagtatcgcc |
| | | ggagcgatctttatcgctcctcagagcattacaaacaactaaaaatgtatatgactataaaatccctgatgctggagataatcttg |
| | | aaatagatcacgcacactatcagctaaaaggatggattaaagatattgctgaatactgtggaattgatgagtttgatccctgggca |
| | | ggtaatgtaaggtttccaatcccagaaccagcctcatttatcattgatgcgatgaaattaactactgataaagatcatcgggtatg |
| | | gtattcaccttctgatgttgaaccggcgatgatttccagtatctggggccatctatcaggtaaaaatgatgaggaaaaatcacatg |
| | | gttataggctatgtgcttcaatacacttcataaaatcagcattagaaacattcaacatggatctcattttagaggttgatgttgat |
| | | cgctattcacggaacagcagatatgaacggaataatgaaaatgagctcgacaatatcccttcaagcactcgactcttcctcttccg |
| | | acatgacggaaccatccacacgctatacggcaattatagaaatggggaaaaaactagttgatgagcttgagctaaatgactctgtt |
| | | gatacattaagcagatggatggctcatcatatcgcagagctcatttatgatgctgaacattgtacagacgacatcgtccgtacagc |
| | | taaacaagcggagattagggactctatctggtcattctggtctaacagatacgaattgccaattggtagcagaccatttcaggagc |
| | | tcgaacctattctaagaaccttaaaaggtcttgatcctgaaaatgagcaaccgagatttttttcaccttaccgagatctaattaat |
| | | gtagaaaaagaaaccagtgaggtccaaaaatggctaaccgccgctaaggatattgattcagcagcaaaaatactgattgattactg |
| | | tttatcgttagcagcagaaaatgctatcgataaatcccaagaatgggtggaattagcacagaaagctggattgaacaaagatgttg |
| | | atctgcttgaaattcgtatctttcagttacgaggtaccccagccaatacagacaatcccaataatgcacaacggagaatactggaa |
| | | aaaaggcaaaaaaggcttgaagcttttctcttattgggctcccagttaaacgaacaactcaaatctcagcttgaagccttaccagc |
| | | aattgaggatgagccaacggatgacgacgaagacttttgatatgacttgctttagcactggagacggctcacaagacggaccacat |
| | | aatagcctaacccaagacttttctactagtcctaatg (SEQ ID NO: 44) |
| 48 | pLG050 | ttgtgcgtagcacttctccagtttttgttgaaacagataaagagactaaatcgatcattcgaacccaaaaatggccgatttgatgc |
| | | agacaacgatttaagccatatctggtagcgcaatcgtcacctatgacaaaagttacatacttgtaatattctgaattcaatattct |
| | | tcgtgaaattcattcaatgcttctttgagtagtgttttggcgttatgataatttcctaaatatcataaggttatcaggcggtgatg |
| | | tatgaggcgatttgtctatggcgattaaaaacagcgcaatcatttatgcaggctatgattatcagacactccaaggtgtcaggcta |
| | | ctggcggattggctcaatacaccaactaaatataaccgaatagcatttgaggctgatgcgaaacaagttgatgctccacaaggcat |
| | | tgatgatattgtctgcgaacgtcaggatggtaaaacagatttttggcaagttaagtttacgccagataccgacaaagaagacaatc |
| | | aactatcatgggaatggttactgaaacgtagtggtcatagtattcgagctcgttctatactgcaaaaaatagctgatgctgttgat |
| | | aaagtacctgcggaaagaaggggagatattactcttttgaccaataaaatacctaatcgtgagatagcaacttgcttgcgaaataa |
| | | caaaatagattggaatcaggttccaattgctaagcagcaaagcattattcttcagttaggtacccaggaaagagcaaagcaatttt |
| | | tcgatatattacaaatatgtcatagtgatcaaagttatacgcgattaaatagtattgtcccagaactacttcgcaaacataccaac |
| | | gaggagggggtatatcgcctgattgaacgagctaaacgttgggctatccagcgtaattcaccttcggatggtggatggatatgtct |
| | | tgaacatattcgtgcagtgatttcaactaatagacctgaacctattccgcagacttttgtcttgccagataactatattgttcctg |
| | | atgcagattttcacgacaaattcattgattcactttttaatcctactaatcgattagttgtcttaactggtgctccaggaaagggt |
| | | aaaagtacttacatcagccatatttgtcagatattacaaactcgcgagtttccttatattcgccatcattattttcttgggttaga |
| | | tgatcgtacgacagatagattaagtcccagaatcgttgctgaagacttgatgtgtcaggtcaaagcattttgctcacaaatcgaaa |
| | | tgaaaaattatcatgcagagcacctacataaagtgctggctgaatgtgggcagatatataaagaagaaggtaaacgatttttcatc |
| | | attattgatggtttggatcatgtctggcgtgataacggcaaagataaatctccactggatgagctattttgccaattgttaccgtt |
| | | gcctgataatgtaacattattggttggtactcaaccagtagatgatgagctattgccatcaagattgttacagaacagtccaagag |
| | | aagaatggttgcacctaccaaatatgtcaggcgatgctattcgtaaatatctatcgggacaagttgaaagtggccgtatcgtattc |
| | | aattttcatcaaagccagtatgaagaagttttatcacagtgtgctgagttgttgactactaaaactcagggatatcctcttcatgt |
| | | tatctactcatgtgaaaaattacatgttgaaggtaaagggttatcgcactgggaaatagaaaacctgcctcgctgcgaaggcggaa |
| | | acattacaaattattataatgaattatggaaaatattaaattacgagcaacgcgatattcttcatctctgttgtgcttttcctttt |
| | | ttatggcctgccacatcattttctgagattttttctgagaggactgaaactataccgaatgttaaggctgtaatccatttgcttta |
| | | tgagtccattgctggattaagaccgtttcatgaaagcttgattgtttttacccgtagcacaactgaacatgagaatagaataaaat |
| | | tattattgccagcgctaatttcatggctggagaaaagcgcacccaaaccgataaaaaattgttggtactggtcatgtcttgcttac |
| | | aatggtgatccatatcctttaagaaatggcttaactagagactggatattggaacggttggctgaagggtatcgacaggatgagtt |
| | | tattcgattactcactcaggctgaaacttctgctttagccgaagggcattttagtgaggcctatcagcatcgttcacgcaagactc |
| | | gactacttaatgctaggttgcaaatctgggatatgtcgacgttgggcgtttgcagtatgattaatgcttctgaagcattgcttaaa |
| | | caatatcaatctacccagaatgtcagttcaccaaagatactggcaactttggctatcgctttatggtttcgtaatcatttcgatga |
| | | agcaaagcgcattacaagattggcgttacaacgctactcaaatgaatcatccgtatataccaataaaaatagcgatgagtcgcgtg |
| | | ctgacattcgtttattaatcaaagctgctgttttgactgagtgtttcgatgaaaaatggttggcaaccggttcagtacacaagtgg |
| | | agtgatagtaatattaatctgcttatcgaatgtgcggaatataaatcagatataggattactattttcattacatgatgtttttaa |
| | | gcaaactgtcataaaaaataaaatagtaaatgcgattgtcagagttgggattgttgaacaaatagatttagaatactggccacatt |
| | | tttctggtcttgactccgctctgctgcggttatacagtcatttatccactgcacatccatgttcacttataacagagcaaggtgaa |
| | | agtgaaatcggtagatatcatgttcatccagaagtatcctacgatgaatggttctatgacagccttttttatcgtcttaatgccag |
| | | tggagattattgttggctaccggttagcacgggggaaggacaggaggaagtcagcagtcattttctccatttaaatgatttctcag |
| | | atattattgctgaaagtatggctctaaatattcaacaaagcttcagcgatttttgttcacttattgctttggtatcagatcttaaa |
| | | gatcatcaaatgcaaatccaacagaagcgaatgttttttaaaactgattgggtaagcattgctttaaatttacacttaatcatgca |
| | | ttgcaagccggttaatacggaagaaattgatattattcttaattctgagcatacagccctgtatcggctgcataaaactattctta |
| | | actttcatagtagagccttcgaatctgatgcaatagcaaactttctggtatttgaggatgggaggcagaaggaaaaactacaagag |
| | | acaaatgaatatttggcgaataatcttgagttgtcagagattgcgcttcattatgatctcaatcaatcaattttttttgagcgagt |
| | | caagttatgttgggactatggtctgggatacggacatcataaagatatagctctgaatcaggtgctgactgcaataaaaactattg |
| | | caactgttgagcctaaatatgcattaacgcagcttgagcgtgtgagtccattggttcataatatttgtgacttcacagatggtgac |
| | | catactcaacattccgtaacggaattgtctgcgctatatgctcatctttctccccttactttaagtagtatctatgacagttatgt |
| | | tagcgagggtgagtggtatgatgcggataatgcattaacgcaatacttaaaacatgctgatctatcatcacctttcgttgagagtt |
| | | tatgccggacattactagatgatgggcaaattgaaataatacagaatcgtgctaaagacaatgccatattgactacgttttggccg |
| | | gaaatattaccacgaaaaatggattatagtagtagcgcaaaacgttcattaagggggactgaaaaatttgatccagcaaaaatcag |
| | | ccctgctgatgtaactaatttactcaatgttcggtcaagttatgaaaatattcctaagtggtatcattattggaaagaccaaggaa |
| | | aagttacagaagtaattaacgtattgctgccaatcattaataatggcttgccagaatatagtgaatttcgttatatattatctgat |
| | | ttatttgaagatacattgcgtttgaaaggtaaaaaatatgcttttcccattttagtgcaggaacatattcagcgaaatggttgggg |
| | | tgaatggggggagtctgatgatcaaacatatgctcggttagataaagttatcagattgtatccggataaaattgatgactttcttt |
| | | acaagacgactcgacttcatcactataaaactaaagaagagaacttggtaattcccgggaataagctaacatatttattagtaaat |
| | | gtaggccgagtggatgaggcgaaaagtctatgtgaagcgatgatttcggaggtagaggcagaaacccagaatcttccgttgtgcaa |
| | | acctcaatggcaatgggagggagaattagataacgatatgatcgccgttaaattcatcattcgtcgtcttttttggcctgttcaat |
| | | gtgtaaaacatcttgtcgctgatcaattgtctcatctcttagttaatggtcaatgtgctgaagaaattgaaaatttacttgtagtt |
| | | gagatgggaaatcgtcaactggagtcagaggtggtagatattttaactgttctctggttagctagtttgaaaggttataaggttca |
| | | gaataatatatcttcctttatttatgctcgtagctttctttcagatgcattgctggaggctatcgttccaaatttaccaaacctca |
| | | gtcgctatcaagtgctgtataaacatcctgatgatgatggtaatcactatggctttgaaaaaacacttggcaatgaacttccccat |
| | | atattttgggatgaagtaaaaaggcttgaggagaaatctggagctccggctaaaatattaatgaaaaaagaatggaatgatatttg |
| | | ttataatcatgttcaacgatgggaaagggttgattatttcttcggttcagagcgtgatggttttactatgagtttttccacaagga |
| | | atacacgatttggtatatctgcatacttgagaaccattaaccggcttatcaacgaatttagaatgccaaagcattatgcagaacat |
| | | tattcgatttgtttaatgtcagccaacccattattttattccgtatctaatcaccgacctggttggttacctttatggcaatatgg |
| | | ggagattaccacaaaggaaaatgtaaaaacatatgttgaggaatgcctgaatgcattcaaaaatgaacaggaaaattcaatattag |
| | | gagcattgtcattacctgtacgcatcgatgaaaataattggttagatattacggctgttatggggatacaaacagaagaatatgcc |
| | | tcttttaagatacaacatgccgactgtggtcatagtgtagatagtttacttcaagcttatagaaatattaaattttcatttgcaaa |
| | | atgggctgaataccaaaattgtgtaccactattgggaagtacacgcgaattactgagaatagcacggtgggatataatgtacgaat |
| | | ttcgtgggcttttctcattcggttgccaggaacaggttactgcctacccggctaaaaatcgtattaacttcgattatcagggtaaa |
| | | accatcggctatagtgacttctggcaagcaataccattatcaatttatcctaaggatatacgctcacctgttgctacttacactgc |
| | | ttatgataaggaccttgcctgtaactggaaaaatcatagcgtactgaaaaagcctaatatcatgttatgtgattgtaaggtactaa |
| | | agagagaaaatagttacagtccttttgaaatatcagatattcgttttcactttgaatctgagccgttatagtaaggattattttgc |
| | | gataattaatcaacggggagctggtcaaagtgcctgctcccatattgactaatatacaaatgtgtttgttaagacctttccaaagg |
| | | tagggggaattatgaatttccgctcctcgctcatagccgcctgccagatttaaccccaccctaccacagggccccctcaagccaag |
| | | ccgccgccaatacaattttcccccacaccaaaacgcctccctccctagagcacgtactcacaacgccga (SEQ ID NO: 45) |
| 49 | pLG051 | gggatttccaccacctcccaccgaccatctaagactttatgccactgtccctaggactgctatgtactaggagcggatgttaaact |
| | | cagactcgtttcagctacattgcgttttgaataatattccatcataataactctttgaaaaatgtgatcttttcatttataacact |
| | | gatgacttgcttatctcattgggatatcggaggagaatacttaactatgacaagcccgattattatgacactggctatattatata |
| | | gattgatattaaaatgtaggattaggttcttgccaaggtgtcaagatttacagataggtttaaaaccatataaatatgttttacgg |
| | | tgagatacaatacatattgtaaggcataaacgcttggtaaaattttaattattggaagaagctaatcatggaacccatatcaatta |
| | | cagtggcaacttatgtagcaactaaacttattgatcaattcatctctcaagaaggatatggttgtattaagaaagcattattcccc |
| | | caaaaaagatatgtggatagattatatcaactaattgaagagacggcaattgagtttgaagaaacatatccagtagaaagtggagc |
| | | aataccattttatcattccgaaccattgtttgagatgttgaatgagcacatcttttttaaagagttccctgacaaagagatattat |
| | | tagacaagttcaaagaatatccaagtatcactcccccaactcaacaacaactcagccttttttatgagatgttatcattaaaaatc |
| | | aataattgttcgaagttaaaaaagctacatatcgaagaaacgtataaagaaaaaatattcgatattaatgaagagctcattcaagt |
| | | caaacttattttacggtctatagatgagaaactaacttttcacttaagtgatgattggttaaatgaaaaaaatagtcaagcaatag |
| | | ctgacttgggaggtcgatacacacccgaactcaacgtaaagctagaaatagcagagatatttgatggcctcggtagaactaatgat |
| | | ttttctaaaatattttattcgcatatagatagctttctggtcgctggaaagaaattacatagttgcgatgtaatttcctcagaatt |
| | | atttgaaataaaccagtccttaaaagaaatttctgatatatatcaggagattaatttttctaaattagatgaaatccctataaata |
| | | aatttaataactatgtttctagctgccagacagctattggcggagcggtatcaatattgtgggaactccgagaaaagtcagagcaa |
| | | gtaggtgaaaccaagcattacagtgataagtattcatctactctgcgaatgcttcgggaatttgactatgcgtgcaatgaattacg |
| | | tatattcattaattcaacaacagtgaagttggctaacaacccattcttacttctcgaaggaaaagcaggaattggtaagtctcatt |
| | | tactggctgatgtgattaaaaatcgaattgcttctgggtatccttcactactcatactagggcaacaacttacttcagatgaatct |
| | | ccatggtcacaaatcttcaagagattacagcttaaaatcacttctcgtgaattcctagaaaaactgaatttatatggcaaaaaaac |
| | | aggaaaaagagtcttagtttttattgatgctattaatgaaggtaatggaaataaattctggaatgacaatattaacagttttgtcg |
| | | atgaaatcagatgctttgaatggcttggtctgataatgtcagtcagaacaacatatagaaatgtaacaatttcacatgagaatgtt |
| | | gtgcgaaataattttgaaattcatgaacatattggattccagaacgttgagttggaagcggttagtctattttatgattattacaa |
| | | tattgagaggccttcatctcctaaccttaatccagagtttaaaaatcctctatttcttaagttattgtgtgaaggcattaagaaaa |
| | | atggtttaaccaaagtgcctgttggatttaatgggatttcaaatatttttaactttttagttgaaggggtaaataaatcattagca |
| | | tcgccaaaaaaatatgcattcgatcccagttttcctcttgttaaagatgctctcaatgaaatcataaaattcaaattagagattgg |
| | | tcgtaatagtatttcacttaaagatgctcactcagtggttcaatctgtagttaatgattatgttgctgataaaaccttcctcagcg |
| | | ccttgattgacgaaggattattgactaaaggcatagtgagaaatgatgataattctactgaggaagtagtttatgtggcttttgaa |
| | | aggtttgatgatcatttaactgttaattttttattaaatgatgttgaaaatatcgaaagtgaatttaagcctgatggtcgtctgaa |
| | | aaaatattttcatgatgaatgtgatttttatataaaatcgggaatagtagaggcgttgtctattcaattgccagaaaggtatgaaa |
| | | aagagctttatgaatttctgccggagttcagcaataatcttaaattactagaagcctttattgatagcttgatatggcgcgatatt |
| | | aaggctattgatttcgaaaaaattagacctttcatcaatgaacatgtttttaaatttaaagatagttttgatcatttcctcgaggc |
| | | agtgatctctatttcaggtttagttggccatccctttaatgctaatttcttgcatgattggctaaaagattattctttggcaaatc |
| | | gagattcgttttggactacagaacttaaatataaatatagtgaagactcagcatttaggcatctaatcgattgggcatgggccaga |
| | | acagataaaagctttgtttcggatgagtcaatcgagctagttgcaactagtttatgctggtttttaacttctagtaaccgagaact |
| | | tcgagattgctcaactaaggctttagtgagtttactcgagccaagaattcctgtattgagaaaaataattgataagttttatggtg |
| | | taaatgatccttacgtttgggaaagaatatttgcagttgcattaggctgtacattgcgaactgataatattaaagaactaaaatat |
| | | ttagccgaaactgtttaccaaaaggtattttgttctaagtatgtgtatccaaatatattacttagagattatgctagagagattat |
| | | tgaatttgctaatcatcttggattggaacttgaaagcattgaattatccaagactagaccaccctacaacagcatttggcctgaca |
| | | agattccttcaaaagaggaactagagtccctttatgataaagaaccttatcgggaactctggagctctattatggaagatggtgac |
| | | ttttcacgatatactattggaacaaattataatcattctgattggtctggttgcaagtttaatgaaacccctgttgaccgtaagca |
| | | agtttttaaaactttcaaatgtaaactaactgatcaacaaaaagacttgtatgatgccacagatcctttcatttatgatgataaat |
| | | gcgaaggaattaaatttggtcgtgtggtcggtagaaaagcacaggaagaaataaaggcgagcaagaaattatttaagaattcattg |
| | | tcatacgatctgttaagtgagtttgaaaatgaaatagagccatacctggatcataataataatctgctggaaactgataaacactt |
| | | tgatcttcgactagctcaacaatttatattcaatcgtgttatagagcttggttgggatccggagaagcatggtaattttgaccaac |
| | | aaataggaactggacgtggacgtagagaggcattccaagaacggattggtaaaaaataccaatggattgcttattatgaatacatg |
| | | gcaaggctagccgataattttactcgttttgaaggttatggtgacgaacgaaaggaaaatccataccaagggccatgggagcctta |
| | | cgtaagagatatagatcccactatcttacttaaagaaactggaacgaaaaaaataagcaataaagaaatgtggtggcttaatgatg |
| | | aagtgtttgattggacttgctctaatgaagactgggttaaaagttctactactataactaattcatatgcttttattgaagttaaa |
| | | gatgataatggtgatgaatggatagtattagaaagtcatccatcatggaaagaaccaaaaattattggaaacgatgattgggggca |
| | | cccacgaaaagaggtttggtatcagatcagaagttatatcgttaaagttgaagaatttgaaaattttagatgttgggcaatagctc |
| | | aagactttatgggcaggtggatgccggaatgtactgatagataccaattatttaatagggagtactattggtccgaagcatttaag |
| | | tcttttaaatcagattattatggtggatctgactggacttcggtaacagaccgggagtctggagctaagatagctgatgttagtgt |
| | | cacttcgattaattatttgtgggaagaggagttcgacaaatcaaaaatagaaactttgaattttttgaagcctagtaacttaatct |
| | | ttgaaaagatgggattaaaaagtggggaagtagagggtagcttcaatgatgaaaatggaactatggtttgctttgcagctgaagct |
| | | gtatatgcttcaaagccgcatctacttgttaaaaaagaaccatttttaacaatgttaagggacaatggttttgaaatcgtttggac |
| | | attattaggtgaaaagggcgttatagggggctcactcatatcaagtcatcattatggtcgacaggagtttagtggagcattttatt |
| | | atgaagacagtcagctaacaggaagtcataaaactagctttacgagataaaaatgaatctcagagctgaatatataagtagtatta |
| | | gaaaccgggttatacttaagaaatcaatcttaagtgtggcagtcgaatggtagctaatatgctagcggcgctaatgcctgtttgtt |
| | | gctcataacaggcattcactttagttatggcagaaaagtatacatgctgggttgggaaagtgtgaaagaaaggaagattgctgcgc |
| | | cgtttgtcgtcacgtttatcttcattggctatgca (SEQ ID NO: 46) |
| 50 | pLG052 | aaatctctttcgcgtcaatagtggtaatatttttttatcattgtcctctttctactgacatactgattgtccgacagtggagccag |
| | | tcgaaattgttgacagctagtcggggctcgtctggtctttctagcagtaagaaacgtattaatattggatcgccactagtttaaca |
| | | gatacctcagaattatttatagactgacaccaccccggcagacgatcctgccctataggaagctaagtggaaacttatccagtaac |
| | | agcttgtcgattttatcccagagggtgttcctcaggatgtatcgctgaaatcaaatccagcactaagaatgaggggtgagaaacca |
| | | tttccttggtgggtctttgaccatttctgttgaactaatgtttttgggttatcaaggatacaaattcaaggcagtgtttcactaaa |
| | | ccttacctcgcttcaataccaatacatttttaatgggtataatatgtgactgcttttgccgcattattgacaggaacaaggactgg |
| | | tgatgaatattgatttcagtttaattcgtagcgcccccaaaagccgtaacgatagctttgaagcactcgccgtacagttatttagg |
| | | aaaacctgtcgagtaccgacaaattcaacatttattagtctgcgtggagatggtggagacggtggcgttgaggcatatttccgctc |
| | | accggacggtgccgtattcggtgttcaggcaaaatactttttccagcttgcttccgcagagcttacacagattgatagttccctta |
| | | aagctgcgctaagcaaccatcccacactaaccgaatactggatttatataccgtttgacctgaccgggcgtgttgctgcgggaaag |
| | | cgaggaaaaagccaggcggaacgctttgaagaatggaaaagtaaagtcgaatcggaagcgtcagcgaaagggaagtcactttctat |
| | | tgtcctttgtaccgctgctgttatctgcaatcaattacttgagatagacccttacggagggatgcgcaggtattggtttgatgaca |
| | | cgttgctgacaacagctcaaattcaacaatgtctggaggacgccattgcttttgccgggccaagatatacttcaatgctggatgtg |
| | | gtgacgaatgctcatgtcggcctggatttctttggtgggactggtgacttttgcgagtggtacgaaacatcattaacaccaatcgt |
| | | tcgagagttccattcactgaatggatacggacgcaaatcgctggatatactcggcgaaacccgtgctacatctgccacggcattga |
| | | ttgaagaaataattgcctactgtgagagcatgagagataacaatgtcacggccacatcggttacagatctttccgtcgctctgtca |
| | | tccctattgacacttttcgctgatgcccgccatgctcaagaagataaattttatgaaaagcatggcaagcatagtgatacagaatc |
| | | gttccgacagttccacgcagagtatatgtgtgcatttcctgccggagatatggatgcggcgagaaaatgggaagagcaggcgcagc |
| | | aactgcaaaatttgctgacttctcaggtcattggtgccgcaacagcacattccttactgctggttgggccagcgggtatcggcaaa |
| | | acccacgcgattgtcagcgcagcattgcgtcgactggaacatggtggtttttcactggtcgtctttggagacgactttggcaaagc |
| | | agagccttgggaagtgctacgcagtaaaatagggctgggtgccgccatcgatcgttcgacattatttgaatgcatacaggcctgcg |
| | | ccgaacatactggcttaccttttgtcatttatatcgatgcattgaacgaaagcccgcgagaagtgcgctggaaggacaagcttccc |
| | | gaattgctcgctcaatgcaagtcttatccagacatcaaaatctgcgtttcaacccgagatacctatcgcaatcttgtggtcgattc |
| | | acgctttccagggtttgctttcgaacacatcggtttttcaggacatcaattcgaagcggtacaagctttcgcagcctactatgagc |
| | | tggatgcagagattacaccacttttttcacccgaactcggtaatcctttatttttacacttggcctgtaaaacgctaaagggcgaa |
| | | ggccgtgacagtctggatatttctttgccgggttttacctctctgtttcaaggacatctcaaacattgcgatgttttaattcgaga |
| | | acgcctccactacgcaaaccctcgtaatctggtaagggctgcaatgatggcactcgcgaaaaccctgacacatgagttgccgcaga |
| | | accgaacgtgggaaacctgttgcgaagcactgagcaaaatagtgggaactgagaccacacctgaatcctttttaaatgcattggca |
| | | catgaaggcctcattatcctttctgttgtagatgaggataccttcctgatccgtctgggttatcaacgctacggtgacatactccg |
| | | tgctatcagccttgtggaaactcttgattcggatacagtaaaactagcggagaaaattgcagcgttaacagaagaagatgctggat |
| | | tgctggaagctcttgccgccgtgctgccagagaaaactgctcttgaaattactgctgaagaagtaggattaccatccgaacaagcc |
| | | cataagctgttcatccagtcattggtttggcgctcccgacaaagtgtagtggaagaaattgatgaacacatccatgcagcactgca |
| | | tacacctggattatgggagtcggtttatgaagcgctgttttcacttagtctggttcctgaccatcgtctaaacgcaactaactggc |
| | | tggggccatttttacggcagtcatccttagctgaacgtgacacctacttgtcattagctgcgctgggatcatttgataataagact |
| | | gctgtctattcactcatccatgcagcactatttgctgacataacccattggcctgctgaaagccggaggctggccagtctaacact |
| | | tgcctggctcacttcgtgtgctgaccgccgaatcagggatttatcctcaaaagggctaagcagaatcctggcaaactacccggaga |
| | | actgccaaacagtaatcagtgaatttgcatattgtgatgatgattacgtattagagcgtattagccttgctatctacagtgcatgc |
| | | ttattgtcataccaacgcagaaatgcgtttatgccagcgctccctggtctattaagcattgcgtcagatagcaagaatattctgct |
| | | ccgggatacggttcagctattagtaaacttgttgaaaacaggagaatttcccacagccgtaacaagccaattacagcattaccaga |
| | | caaacgtatcattaccatcacgatggcctgtactggcggatgtcaaacccctcctagatctggaacatttaccatcaaacatggtg |
| | | ctctggggagaatccatggccccggatttctggcgttatcaggtggaatcgaagatttccggctttgacttggagagcgccaatat |
| | | cagccatgaaaacattgcctgttggttaatgcgagaagcacttaatttaggatatcccggttataaccactgcgcgctcaattatg |
| | | atcgccatatcgggagtcagtatggctcgggacggggtagaaaagggtatgctgaccgactcggtaaaaaatattactggatcgcc |
| | | ttacatcgactactgggcattctggccagtaatgttcccgcactggaagacccatattccgactacgaacctacaagtgatcttct |
| | | atggtcagtcgacgtccgtaaagttgacctgaccgatgtacgcgatatcaccgcagaaggtgtctatccagtactgatggaggaaa |
| | | caaattatgcattccctgaccacaattcagatatcaaaggttgggttaggaccgatgattttccaccttatgaagcttgtcttatt |
| | | cgaactgacgaggaaggagagcagtgggtagcgctttcacatagctattgggatgacgataaagcgccgaatgaaaatagctggga |
| | | ttccccgtacttgggagtgcgtgcttcctactcaagcgcactcataaatgaaagcatccagaactttaaacagaaaagatcacgcg |
| | | atattttccaatataatcagggaagtagttgttatcgcggttatcttgctgaatatcctgacagcccggtatacaaacaacttctt |
| | | aatagtgatgaagatagtgaagcgtttaattttacagaagtcagtttactgcgcggaaacgaatgggaatacgactactcatatac |
| | | catgcccgagcgccaggataacctcattgcgccatgcctgggaattattcaaaaactcgaacttttatgggattgtcaaagcggtt |
| | | gggttgatcattctggcaaacttatcgccttccatcaaaaaggtgtaaaacaacgcggacttttcatccatcgttcggcattgaac |
| | | gcctatctgtccataacaggtgaagagcttatacatcgccgttttgctaacagaggatattttgatttagctggtcgtaatagcac |
| | | gcaaatagacctgaaaacttggatccagtaccgggcagacaaggcaccggtagttttacgagaagaggaactgccgtttaactgct |
| | | gacaacgatacttattaagtaatcaactggctgccttggcatcgaatgccagaagagccatttcgcactaccaatttaagtagact |
| | | gaaggaatacttggtacaagcaaacgcacgccatatcggatagaggggact (SEQ ID NO: 47) |
| 51 | pLG053 | gcgcagctgacaaagattgaccgtgagcgctctgatggagaaagacgatagttgctgagtacgatatcgagggtacatttctctgt |
| | | gtaggggtagttatttacaaaaaaataggagaataattaaatggtcaaaccaaactgggataactttaaagctaaatttagtgaga |
| | | atcctcaaggtaattttgagtggttttgctacttgttgttctgtcaagaattcaaaatgcccgcaggtatatttagatataagaat |
| | | caatctggtatcgaaactaatccaataaccaaagataatgaaattatcggttggcaatctaaattctatgacacaaaattgtcgga |
| | | taacaaagctgatcttatagaaatgattgagaaaagcaaaaaggcttatccaggattaagtaaaatcattttctatactaatcaag |
| | | agtgggggcaggggagaaagtcccatgaacctgaaggcgataagaacgctgataattatttggaaactgtcggaaatagtaacgat |
| | | cccaaaataaaaattgaagttgatcagaaagcatatgagtcgggtatcgaaatagtatggagagttgctagtttttttgaatcacc |
| | | gtttgtaatagttgagaatgaaaagattgctaaacatttcttctcccttaatgaaagcatctttgatttattagaagaaaagcgca |
| | | agcacacagaaaatgttttatatgaaattcaaaccaatatagagttcaaagacagaagtattgaaattgacagacgacattgcata |
| | | gaacttctacatgagaatctagttcagaaaaaaattgtcatcgtcagcggagaaggtggggttggaaaaacagcagttatcaaaaa |
| | | aatttatgaagcagaaaaacaatacactcctttctatgtctttaaggctagcgagtttaaaaaggacagcattaatgagttattcg |
| | | gtgcgcatggcttagacgatttctctaatgctcatcaagacgaattacgtaaagtcatagtcgtagattctgctgaaaagctttta |
| | | gaactgaccaatatcgatccttttaaagaattcctgactgttttaataaaggataaatggcaggttgttttcacaacccgtaacaa |
| | | ttacttggcagatctgaactatgctttcatagatatttataagataactcctggaaacttagtaataaagaaccttgaacgcggcg |
| | | agctaatagagttatctgataacaatggatttagccttcctcaagatgttcgattattagaactaatcaaaaatccattttatcta |
| | | agtgaatatttgaggttctataccggtgaaagcatcgattatgtgagcttcaaagaaaagctatggaataagattatcgtcaaaaa |
| | | taaaccttctcgggagcagtgtttcttagcgactgcttttcagcgggctagtgagggccaattttttgtctccccggcatgtgata |
| | | ctggaattttagatgagttagttaaagacggaattgtcggctatgaagctgctggttacttcattacacatgatatatacgaggaa |
| | | tgggcattagaaaagaaaatttctgtcgattatatccgtaaagcgaacaataacgagttcttcgaaaaaataggagaatcacttcc |
| | | tgttcgccgtagttttcggaattggatatctgaacgattgcttttagatgaccagtccataaagccttttatcgcagaaatagtct |
| | | gtggagaaggaatatcaaatttttggaaagacgagttatgggtagctgtccttctttccgacaattcaagcatattttttaattac |
| | | tttaaaagatatttacttagtagtgaccagaatctattaaaaagacttactttcttattgaggcttgcttgcaaggacgttgatta |
| | | cgatctgcttaaacagttaggtgtaagtaattcagatctgctttccattaaatatgttcttactaagcctaagggaactggttggc |
| | | agagtgtgatccaatttatctatgaaaatttagatgaaatagggatcagaaatattaattttatacttcctgtgattcaggagtgg |
| | | aatcaaagaaacaaagtgggtgaaacgactcgattatctagtttgatagctctaaaatattatcaatggactatagatgaggatgt |
| | | ctatttatccggaagggataatgagaaaaatattctgcatacgattcttcatggggcggccatgattaaacctgaaatggaagagg |
| | | ttttagttaaggttcttaaaaataggtggaaagagcatggtaccccatatttcgaccttatgaccttaatccttactgacttagat |
| | | tcatatccggtttgggcatctctcccggaatatgttctacaattggcagatctgttctggtatcggccacttaaagaaacaggcga |
| | | acgttatcacagtatggatattgaagatgagttcggtctatttaggtctcatcacgactattatccagaaagtccatatcagactc |
| | | ctatatattggttactacaatcacagttcaaaaaaacaatagactttattcttgattttacgaacaagacaacgatatgttttgcc |
| | | cactcccattttgctaaaaacgaaattgaagaagtagatgtctttattgaagaaggaaagtttataaagcaatatatatgcaatcg |
| | | tctgtggtgctcataccgaggaacacaggtctctacctacttactttcatcaattcatatggcattggaaaagttttttcttgaga |
| | | attttaaaaatgcagactcgaaagtgttggaaagttggcttcttttcttgttaagaaataccaagtcagcttctatttctgcagta |
| | | gttacgagtattgtacttgcattccctgagaagacattcaatgtagctaaagtactattccaaacaaaggacttcttccgttttga |
| | | tatgaatcgaatggttctagacagaacacataaaagttcattaatctccctcagggatggctttggcggtacagattacagaaact |
| | | ctttgcacgaagaagatagaattaaagcttgcgatgatgtgcatagaaatacttatcttgaaaatcttgccttgcattatcaaatt |
| | | ttcaggagtgaaaatgtaacggagaaagatgccattgaaaggcaacaagtgctctgggatattttcgacaaatactataatcagct |
| | | tccagatgaagctcaagaaactgaagccgataagacgtggaggctctgcttggcaagaatggatcggcgaaagatgaaaataacta |
| | | ccaaggagaaagatgaagggattgagatatcattcaatcctgagattgaccctaaactaaagcaatatagtgaggaagcaataaag |
| | | aaaaactccgagcatatgaagtatgtaacgctgaaactatgggcaagctataaaagagaaaaggatgaacgttataagaattatgg |
| | | aatgtatgaggacaatccgcaaattgctttacaagagaccaaagaaataataaaaaagcttaatgaggaagggggtgaagatttca |
| | | gactattaaatggtaatataccagcagacgtttgttctgtattactgttagattattttaatcagttgaataatgaagagagagaa |
| | | tactgtaaagatattgttctagcgtattctaaacttccgttgaaggaaggctataattatcaggtacaagatggaacaacctcggc |
| | | aatttcagccttacccgtgatttatcataattatccaatggaaagggagactataaaaacaatattacttttgacactgtttaatg |
| | | accactctattggaatggcaggtgggcgctactcagtatttcctagtatggtgattcataaattatggctagactattttgatgat |
| | | atgcagtccctattgtttggttttttgattttaaagccaaaatatgtaatcctttcaagaaaaatcattcatgaaagttatcgtca |
| | | agtagactatgacattaaaaaaataaatattaataaggtgtttttaaataactataagcattgcatatcaaatgtcatcgataata |
| | | aaatatctatagatgatttgggaagtatggataaagttgatctacatattttgaacacagctttccaattaattccagttgatact |
| | | gttaatattgaacataagaaattggtttccttaattgttaaaagattttctacaagcctattgtcaagtgttcgagaagatagagt |
| | | tgattacgctcttcggcagtctttcttggaaagatttgcctactttacgcttcatgcgcccgtgagcgatattcccgattatataa |
| | | aaccttttcttgatggtttcaacggttcagagcctatttcagagttatttaaaaaatttattctcgtcgaagatagattaaatact |
| | | tacgccaaattttggaaggtttgggatttgttttttgataaagtggttactttgtgcaaggatggagataggtattggtatgtaga |
| | | taaaattataaaaagttacctttttgctgaatctccatggaaagaaaactctaatggttggcacacatttaaagatagcaatagtc |
| | | aattcttttgcgatgtatctaggactatgggccattgcccttcaactttatattctcttgccaaatctttgaataacattgccagt |
| | | tgctatcttaatcaaggtataacttggctttcagaaatattgtcggttaataaaaagctatgggaaaagaaattggaaaatgatac |
| | | tgtttattatttggaatgtttggttaggcggtatattaacaatgagcgtgagcgaattagacgaaccaaacagttgaaacaagagg |
| | | tcttagtaatattggattttttggtagagaaaggatcggttgttggttatatgtcacgggaaaatattctgtgatgtagttgaaaa |
| | | taataattttaatgagagcttttccaatttaggctccagggattggagcctttttattatcg (SEQ ID NO: 48) |
| 52 | pLG054 | accttcttcgctaactgatggctaatgaggccgtaataaaacttaccttacctgtaaatacttttactactcattcagatcagaat |
| | | gaagaggtttattttatttcattgaaaattaataaataaaaatattggcacggtatgtgcttatacagaatgccattttactaaca |
| | | aggaatttaccgatgtcggaattaaaaaaatttcaggtacaaacagcacgtgcattgccggtgattgtgttggcggataccagtgg |
| | | gagtatgtcaacagatggcaagattgatgcacttaatctggggctcagggaaatgcttgatagttttaaacaagagagccgcctgc |
| | | gcgctgaaattcaggtcagcgttattacgtttggtggtcaccaggctgaagttagcttgccattgacgcctgctcaccagttgcaa |
| | | agtattacctccctggaggcaaatggcatgactccactgggtggcgcactatcgctggcctgcgagattattgaaaatccaacgcg |
| | | aaaatttcagccgattatcgtgcttatctccgatggctaccctaacgacgactgggaagccccttttgctcgcctgattcacggtg |
| | | aacttactgccaaggcctcccgttttgccatggctatcggtgcagatgccgatgaatcaatgctcaacgaatttgcaaatgatcct |
| | | gaggctcctctcttccacgcagaaaacgcgcgtgacattcgccgttttttcagagcggtaagcatgagcgtcagcgcacgaagccg |
| | | ttccgcaaccccgaatcagtctacaccgttgcagatcccgagtgctgatgatcaggactgggagttctgatgcgcctgtacgcttc |
| | | tggcacctcggtacgtggtcccgcacaccaacaggatgatgaacccaatcaggatgctgtagggatttacggtctgcgtggtggct |
| | | ggtgtattgccgttgctgacgggttgggtagccgatcaaaaagtcatttgggttcccgtaaggcagtcaatctgctgcggcagatc |
| | | atgcgcggtgcggagatgctggtcgctgccgaagtgactccagcgttacgtgaagcttggctaaaccactttggtactgactatca |
| | | cgattacgaaactacctgtttgtgggcctgtgtcgaggcgtcgggccatggcgtgatcggacaggtaggcgatggcctgctgctgg |
| | | tcagaagtgctggggtgttcaacgtaatgagcacaccacgacggggttacagcaatcacactgagactctggcacagcgtgcacat |
| | | ttagatagttgcagtgccagagtggcattaacccaacccggagatggcgtactgatgatgaccgacggtatcgctgatgaccttat |
| | | cccggatcagctggagtcattctttaatgctatctaccaacggatacggcaatgcagcaagcgtcgtacacgtcgctggttaacac |
| | | aggaacttaacggctggtcgactccaaatcatggtgacgacaagagcctcgctggaattttcaggatggactgaccacatgacatc |
| | | aatagtaaaaacgcaaccaaaacgcgtggtgaaggataccaggggatcaagttacgagctgacagaggtaattaaccgtggtggac |
| | | aaggcattgtttaccggacgacctatccgcaaaccctggtgaaaggttttactaatcaggacccacaggaacgccagcgctggcgc |
| | | aaccatattacatggctgctcagccaggatcttagcgacctcaaacttgcacgtccattaatacttctggcggagcctcgctttgg |
| | | ttacgtaatggagctgatggatggcctggttccattggatagcctgttgaacagctttataaacgcaggggaggagtctctggcgg |
| | | attatctgcgtcagggaggactccgtcggcggattcgtatcctttgccagctggcacgcacactcaatcagcttcacgcacgcggc |
| | | atgttgtatggtgatctctcccccagcaatatttttgtttcagacgatccaagacacgcggagacctggcttatcgactgcgataa |
| | | catcagcctgacagcccatcacaatctgactctgcataccgtggactatggtgctcccgaagtggtcaggggagaatcgttactgt |
| | | ccagcctgaccgatgtatggagcttcgccgtcattgcctggcaactgctgactcataaccatccgtttaaaggggaactggtcagt |
| | | aatggtcctcctgagatggaagaagctgccatgcgcggtgaatacccgtggatcaatgacgcacaggatgacgcgaatcactgctt |
| | | cgtcaatctgccaccggagctgattgcacatagtgcactgccaactctcttcgctcgctgctttgaacagggaaggtttgaacctc |
| | | atgagcgtccgggtatggctgaatggcttgaggcgctgagtgctgtggatgagcgtctgtttacctgtgacagctgtgggggaagc |
| | | acgctcctggcagaggaagcagaaagcgcgaacgatgccgtttgcttttactgtgacagtcccgccgaccgcctcctggtccggtt |
| | | tagtgaatatgtgactgagcaacaagacggctcgaatccagacaccaaaaccttgattgccacagggcgaaatgtatggctgcagc |
| | | caggtcaccgtgttgagttaaagcgcctgttgccaagttttatctatgaccactggccatcagatcatctgcagattgattacacc |
| | | gcccgcgggattgggatccatccgttgcttggcggagagctatacctacaacgcggtgaaactatcaaaccactgcgggggtttca |
| | | gggactcaaaaacgagctgcgcggaacaggtggggagccttggcagatccatatcggcgatcctggccagtcgcatgtaatctggc |
| | | agttcacgtggtgacaatatatgaaaattaacgaatttccactgatgtccaaagatattctgctgctggaaacggataaaggaacc |
| | | accgggttccggccaaagcaagctatcacctttcaggcgtatggtgagaattggctggcggtacagggggatcattgcgtaagtgt |
| | | ccagtgctcccctggtgatcacgaactctttagccgtctggtgatgagggatcaggttcgttggttgctgaccagtaaagcggaaa |
| | | aacagttgcgggttcaatattgcacgcctgttgaagtcacaccaatgcagctcgagttgggaattgatgagcgaattgcggaagac |
| | | cttttcgcgaaaaaacagatcaataacaacgatattgagcttgcctgccgctggtttgaagagacttttattgtccatagcgagtc |
| | | agaaagtgactggttaacggttggccgttttagcaatcatgcagccaaaggtggttttcagctattgggaaacggctggcgtgcgg |
| | | atgttgagcgcaacccggaccacggctttcttatcagacgtattactggtcatttaagccatgatacaggcttctcgttgctggtt |
| | | ggacacttcgccttccgggatatgtcagttgctgcggtgctgaatagtgcaacccagcaggcaatgctcgatgccgcactgcgaga |
| | | cagtgccagctaccttgagctctggaatctctacaacgataaagagtggcagagcgagttgaaaaaggccgaaacgctgggtgttc |
| | | tgcgctttgttgcgtgcgagggcaccgaagctggccgggaaaatgtctggcatctgactccccgaactcctgaagaatacagagaa |
| | | tttcgccagcgctggcgcgcgctcgatctgcccgcaggcactcaggttgacctgggcgctgaaactcccgactgggcagaagaact |
| | | cagtaccgaagaggatacggtactgaaaacgccgcgcgggaagatcgagttcgctgatgaatatgtggtctttacttcagcctcga |
| | | atcgccgagacgtgcgccccgcaaagcctgaaggatggctctacctctcgttggcaggatatcgcacagtcggcaaacgtcgcctg |
| | | gcggcaaaacgtgccattgattccggtaaacgcatgccacagttgaagtggctgctggaaggggtcgttgttcctgctgctcggcg |
| | | tcgcaacatccaggggatgacaccctacgcccgcgaaatctttaagggtggcaaaccaacgggcaaccaggaactggctgtgttta |
| | | ccgctctgaacacacccgacattgctatcgtaattggcccgcccggaacagggaaaacccaggtgatcgctgcgctacagcgacgt |
| | | ctggcggaagaggcccaggaaaagaatattgctgctcaggttttaatcagcagttttcagcatgatgccgtcgataacgcgctgga |
| | | ccgcagtgacgttttcggtctgcctgcatcacgtgtgggcgggcgtcgtgcttcagtagaagacgagtcaccactggatccctggt |
| | | tgtctcgccacgccagtcatctgcaggagaaaattgctgaccagtatcaacgctacccggagttgaaaacaattgccgacctcact |
| | | tcccggcttgccctgcagcgattggcaaacgacctgcctcaacaacgggcagaggctttttcgcatatttatcaggacgtcaattc |
| | | cctggcagagaaagggctggtcacggactcccggcttgagatacgtctgcaggactatattaagcatctgaaacaggatggtgttg |
| | | ctgaggtcagtacggtgatgaatgtagcagtattgcgccgcattcgcgcgttacggaccactcagactgctttctcagatgatggt |
| | | gccgatcgtgcctgggatttgctgcgatggttgaagcggaatgttcctgacatcgacgctgagctgacctcggtattggaaatagc |
| | | tgccgatgccagagaagttcctgtggcactcgtcgagtgccagcaacagctgctggagcgttttctgcccgattatcgacctccgg |
| | | ccctcaaaaataagatcgatgatgaaggactggctctactgaatgacctcgacaagcatctttccgacttgatgcatcggcgtaag |
| | | cagggtgtggcatgggtgcttgaacaaatggccgatacgctggagatggaccgccgtgccgcacaggaggtggtggatgaatacgc |
| | | catggtggtgggagcgacctgccagcaggccgccgggcaacagatggccagcctcaagtcggtttcaggagtcaagagcagtgaca |
| | | ttgagttcgataccgtagtcgttgacgaggctgcacgcgccaaccctcttgacctgtttgtgcctatgtcgatggccacgcggaga |
| | | attattctggtcggcgacgaccgccagcttccgcatatgctggaaccggatattgaaggccagttacaggaggagcatcagcttac |
| | | ggcactgcaactggctgcctttcgttcaagtctttttgagcgcatgaggctaaagctactggacctgcaaaagaaagataatttac |
| | | agagggttgtgatgcttgataagcagttccgcatgcatccactgctgggagatttcatcagccagcagttttatgaaaaagaaggg |
| | | ctggggagagtggaaccaggccgtagcgcagaggaatttgtctttgacgaaggtttcctgagagcgctggggccactggcgtcggc |
| | | ctatcgtgacaaggtctgccagtggatcgacctgcccgcttctgctgggctggcagaaaaatcaggaaccagccgtatccgcacca |
| | | ttgaagcggagcgtattgctcaagaggtggcacagttactgaaagccggaggagaaaccctctctgttggggtaattactttctat |
| | | gccgcacaacgagaactgattatggaaaagttatccgaaatcaggctggaaggcgtgccactgatggaaaaacgtaacggaaccta |
| | | tgaaccgcatgaaaactttcgctgggtgcgcaagtaccgtgctgacggttcgttcagccaggaagagcggttacgagtaggttcgg |
| | | tggatgccttccagggtaaagagttcgatgttgtactgctatcctgcgtgcgcacctggcgtcagccgaggtcctcatctgccgcc |
| | | gatgatgcagctgccagggaacaaatgcttaatgaactgttcggtttcctgcgtctgcctaaccgcatgaacgtcgccatgagccg |
| | | acaacgacagatgctgctttgcttcggcgatgcagcactggccaccgctcccgaagccctggaagccgcgccagcactggcagcat |
| | | ttcataccttatgcggaggcgttcatggcactcttcgctgaaacaggtatttatattcaatctgccccacggccgcagggtgaagc |
| | | gcgcccgatactctggccagtcaggatacatagggtgctctacccggaaagctatcaggctcagatcaatgtcttccaacgcgcaa |
| | | ttctcggattggtacgagcgcgcgtcgtacgtccgaccgaactggcagaactgaccggtctgcaccctaaacttattacgcttatc |
| | | ctggcacaaagcgtcagtaatggctggcttgagtccggtgaagataccctcacttcagcgggtcagcggttgctggatgatgagga |
| | | tgacggtattggcaaacaaaaatcaggctatgtattgcaggatgctgtaagcggaaagttctggccgcgtctggtcagcacattga |
| | | agcaaatcgaaccggtcaatcctctggataaatatccgcaatttatactgaccaggaaaacaggagcgacactgcgacctttcctg |
| | | atgaatgccagccgatcgccactgccgcctctggaacgcaaagaactgaagcgtgcctggcgtgactatcgtgacgactatcgtgc |
| | | cagtcagcaactgggcgtcagccgtttgccgccacacattaacctgcacggtctgcagcagctagaggaaccaccgcagtgcgcac |
| | | gaatactggtgtggatcaccactgatcgagagagtggacagctatggagtgccgcggacccatttgctctgcgcagtaacgcatgg |
| | | tggctggacctgccttcaatcgtggaaagtgactcccggttgcaaaagatactggaaccgctggttgtggtgccacgcgccgcaga |
| | | acaaacctaccagcagtggcttgaggctatcgcgcacgaaactgattttaagatgatgagtcaatacccttgggccgaacgtttac |
| | | cggatgtgaaacgttatttggtggcgctattggtacatagagggaggatcgagcagggtgataacggtcaaagtgagctggatgcc |
| | | gcactgaacgagtgccagaagctgctggaggttgttatgcagtggctgattcgtcgtcatccagccaacgcggaattattacccaa |
| | | gggccgcctggataaaattaatacggccaacttgctcaaggatatgaaaataccagcatttaccccatcagttattgatggcctat |
| | | ctggccagataatacgtcaggtgcgctacgcatgtagcaacccatccggctcattgaaggcactactttttgcagcggctgtcggt |
| | | gcgaaccaggatccacagcacccattttggtcactggatgactcagcgttacaactgccaatgctgctgcaactggcggatcgtcg |
| | | caacaagagtagtcatggacagagtaaatatcttgataagccggtacaggaactcactcagcagatggttgaggaaagtatcagtt |
| | | atgcattgagttttaccgaacgttttaaggaatggatgtaatgtcaaaacgagcacaacagaagtatacctcacctattcccaagc |
| | | agagaaatggctctgctgcggcatctgccatcaccacacttcagaggtctgcaatgacaaccgagtcgcagattattgccgcagcc |
| | | catcacacagctcagagtgaaaagcttccaaaagatatcgattttgatgtgacatggctggaacgtatcagtcaacgtcttcagca |
| | | ggaaggagatgatcaatttgtctcctggcttcagacatttactcttttctgccagaaactggcgcaaagggatgaagagacgcaag |
| | | cagcagcacagcgtattcaacagctggagctgacgctggaggagcaaagcgaaaagttagaacaggaccgtgttgaacatgacatt |
| | | caagctcgggaactggcggaaaagaaagccgggatcgtgagcaaagaacgagagctgaatgaacgtgagctcaacgccaaagcggg |
| | | cttcagcgagcagaatgcagcatcgctgcgaaacctgacccagaggcagcagttactcgaccagcagcatcaggaggatattcaac |
| | | agctcatcacacaaaagcaggggttaatgcgggaaatatcgcaggccattgtccagttgacccagttacaaatccagcaaagcgac |
| | | gcggaggcacagcgcagcttgtcactggaccagcgcgaagaagacatcatcaggaaagaggaggatctgaagcgcgccagccgtcg |
| | | tctggaacgagacgagcggtctgtagaggcggagagacaggcgctgaacgaatgtttggctgaagcaatgcaaacagaacgccttg |
| | | agtttgaaaagaagctggatcagaaagagcgtcagttcgacaaagctcaggaacgggtgcaaaacctcagtgaacgcctcatggaa |
| | | tgggaggaacttgatcaggcgctcaatggccaatccgcttcgcaaatgctgaatgagctggataagttacgcgatgaaaaccgcga |
| | | acttaaaagtcagttcgcgcacactaacctagcagagctggagcgcgagaacaaatctctggccaacagcaaaagcgctcttaaaa |
| | | atcagctggaaaatctgcttgcagagatggacaagctacaacgcgaggtggatcttcagcgagtggctgcgacccagcttgagaca |
| | | gtggcacgggagaagcggcttcttgagcagcagaaacatctgcttggtcaccagattgatgagattgaagctcgtattggcaagct |
| | | gaccgatgccagcaaaacccagacgccgttccctgccatgtcacaaatggacgagaagaatgggctcaacgcaaaacgtgatcatc |
| | | gagaggtcggtgacctgaaaaattttgccagtgagcttcagcagcgtattgctcaggcggaagagagcgtgcagctattctatcca |
| | | ctggaaagtatccagctgctgcttggtggtctggcgatgagccaactgcacctgttccaagggatcagcgggaccggaaaaaccag |
| | | cctcgccaaggcctttgcaaaagcgatggggggattttgtaccgatatttcggtgcaggctggctggcgtgaccgcgacgatcttc |
| | | taggccactataatgccttcgagcggcgctattacgagaaagactgccttcaggcactctaccgtgctcaaacaccgtactggcag |
| | | gacacctgtaatgtcattcttctcgatgagatgaatctttctcgaccggagcagtattttgctgagtttctctcggccctggagaa |
| | | gaacagccacgctgatcgaaaaattgcccttaccgaaacagctttactcaatgccccggaacggctcgttgaaggacgccatattc |
| | | tggtaccaggtaacctgtggtttattggcaccgccaaccatgatgaaaccacaaatgagctggccgacaaaacctacgatcgtgcc |
| | | catgtgatgacactaccgaagcacgacactcgctttcctgtcagggagatggagaaaaccagctattcgtggcggtcactgcatga |
| | | agcctttgctaaagcaaaaacgcaacatgcggaaacggtcaggaacatgctggagcaactgtccggtcatgaatttactcacctgc |
| | | tggaaacagattttggcatcggctggggcaaccgttttgacaagcaggcgatggatttcatcccggtgacgatggcctccggggca |
| | | gaagctgggcgcgcgctcgatcatctgctggcgacccgtattatgcgctcaggtaaggttaccgggcgctataatattggcttgga |
| | | atcggtcacacgactcaaagaagaacttgaatttttctggattcaggtcggtctgcaaggcgatccggttgaatctatggcattgc |
| | | tggaggcagatatccgccgtctgtcaggtgcgcgctgatgtggcacgatcgtttaactggtaggcaacatgcacatcttccgcaac |
| | | ggattgatcacgggcgttactcaatcgaggcttcccctctgacgctaaatggacatacaccgaattttttcggattgctggtcagc |
| | | gacggcggagcaaattgtcggctggacgatacgctgcataacttcattcagcctccgcccggccatgaagaggaaacccggctgct |
| | | ggaggaagccatcaccacgatcggtgccgcagttgatgatgacatcagtgtgctatcgccgctgatgccagcagctattgtcgata |
| | | atcaaagccttttgctacctttcgaacgtgcactgctggaggtgatacaaaaaggacatttacagcatatatcacagcggccgcgg |
| | | ctggatttacgttatgacgatgaggtggccgacgttgcccgcgtgcgtcgtctggcaaagggtgcactggtacatctggcgtcaca |
| | | ctccgaatgctggcagcgtcagacactcggcggcgtggtacccaagcagatactggcacagtttagcgaagatgatttcaatatct |
| | | acgagaatcgggtttatgcgcgattactggataagatcgaacgtcatttgtatcaccggctgcgcactttgagaagcctgcaatct |
| | | actcttgcccaagcactggacttctatcaatctcaggaggtgaattaccgcctgcgcaatgctatttgtcagttgtgggggatgac |
| | | ttacgatgaggatgcgactgatggcgcatctcggcagctcaacgccacattggcgacgctggagcaaattttccgcatcatttccg |
| | | gtctgcgacaaagcggcctctatctgcgggtaagtcgtactgcgcaagtgacaggtggagttcatatgacgaatattttaagtcac |
| | | gatcctcactatggtcatttgcctttactatgggcacagttggctgacggggctcagcccgaaaatttgcctcaacaacgcctcag |
| | | agtgaaccagagcctggcagctgcgtatagcagctatgccgggttggtgttacgccatgcgttgcagccctggttacacggtaaga |
| | | gtgaaggaagctgggctggtcgcactctgcgacttcgccagcaaggcatggaatggctgctgagctgtgattccaatgacagtgcc |
| | | agtgaagagacgctgttgtctctggtgccatttctgaaccaccagcaggtagcggtagacctaccggaaaatcggtatatcgcctg |
| | | gccttgcgtggggcatttacagcaggcattacctgataaagagggctggattcggctttcacctttagatatgtactgtgtagagc |
| | | gttttggcttactgatagataaaattcttagccgggaattattgcgaaactttgcccgtccggttatccgtattccccggtgcgta |
| | | ttaccacttgctacaaaactgtcttcactgacagttgatcaacagttaaatcagataacactgcatggggatctgactaaagctga |
| | | gctggaacaattaacctctcatttaatcaacaacaatgctagcacacaggcagaggaaattacgctgcgataccgggaatggcgag |
| | | cattgcaacagtgccctgtctgcgaccatacaaccgaactggtttatcaatatcccggtggatttaaaaccctctgtaaaaactgc |
| | | aataccgctcgttatttcagccagcatgaaaatgcacacttttttgaacaaaccagaacagtagaaagagaaagtaaaaccttcct |
| | | ggctcaggggcggagagtttttaactttcagttttagcagggtttttacgactcgctgcatttttaaagagttaagaataatgaaa |
| | | cttcagggcatcttttatatatcggtattacgcaaatcagtagtttcggttgcgcgttttgtatacataccggcaagtgtccaatc |
| | | acagtgaatagccaaaatcgccgggagcacgttcggtcagcctgcggacatggtttttatcacgt (SEQ ID NO: 49) |
| 53 | pLG055 | ggattcaccattatagtgacatgttcaagatgatgatatatctttgaaaagtgttctctttgcgaacggtatagaatttctagcgt |
| | | tacttttcataattacactttttagggttaggcaggcacaatctatgcgctgtcttagataactacatccatttttactggactac |
| | | caccaacaaaaatttagtggtgcaggagaaaacgtgaagtatcagatagtaggtggtgctggcctgcaccgcagcgaaaccaaaac |
| | | agttgatatgatggttaagcagttaccagatagttggtttggctatgctggcttagttgttactgatagccaagggtcgatggaaa |
| | | tcgatatgctaattattactgctgaccgtctgctattagtcgagcttaaagagtggaatggtaacatcacatttgaaggggggaag |
| | | tggctgcaaaatggtaagtcacgaggcaaaagtccctatcagatcaagcgtgagcatgcactgcgactaaaagatttgttgcagga |
| | | agagttatctcgtaagctgggttactttttgcatgttgaggctcatgtagtgctgtgtggcacagctggtcctgaaaacttgccat |
| | | taagtgagaggcgctatgttcatacccgtgatgaattcttgactataggtaacccaaaaaattacgaaaagctggtgcaacacact |
| | | aacttttttcatctttttgaagggggaaagcctcgaccaaattctgatgaggcattacctataattaagtccttctttgaaggacc |
| | | aaaagtcaggcctttgccactaaaagaaagcggttatcttgcgaacgataagccattctttagtcaccctcacatggtctacaacg |
| | | aattcagggctacccacaaagacaatagtcaacacagaggtctgctacggcagtggaactttgatgccttgggtgtagcaaacgca |
| | | atgcaaacattgtgggctgagatagctctgcgtgagactcgagtcggtcgcctagttcgtcatggcagcgcaactatgcaggatta |
| | | tatgttgcgtgctgtaagggaactatccgaggaggatataactgatgatgcccgtgagctgtatgagttacgccgtagttttagcc |
| | | gattagatgagattctagatagcgaagctgacggatggagtaaatctgagcgtattgatcgcgttcgtgcattattagctccattc |
| | | tcggaattacatagcttgggtatcagtcattgtgatattgacccgcacaatctatggtacgcaggggatcagaagagcattgtcgt |
| | | tactggctttggcgcagcctcactggagggacataatagcctagagtcattgcgtccgacattgcaaagtgctccatatattttgc |
| | | ccgaagatgcttttgaagaagcagttgagccctatcgcctagatgtattcatgttggctgtaattgcttatcgtatttgttttgca |
| | | ggtgaatcattactgactcctggacagatgcctgaatggagagctccattaactgatccttttagcggtattctaaatagctggtt |
| | | tgagcaagctcttaaccttgagccaagtaaacgctttccacgtgcggacataatgctcaatgagtttaatgcagctactaaggaac |
| | | atagccaagaatttgatgaagctaaccagatttatcaagaattaaagcaaaacaaattctttcgcgaagggatgaacagcgttggt |
| | | gtgttaattgagtttcctccacttcctgaacagttgtctatggtttactctgctcttgctgctattgctacgactggcagcatcag |
| | | ttatcactgtgaacaaggtgggaaagctctgcaggtaaaattgtgggatggtgttattttgacccctcaacaacctggtgttaacc |
| | | gccgtatccacgcttttaagcaacggatcgataagcttacgcatataaatctgccaactcctaaggtgcagtcctatggactatta |
| | | ggacaaggcggcttgtatgtagtgagcgagtatgtggatggcctaccgtggtcacagtttattgctgagaacgtgttagtacaatc |
| | | ccaacgttttacaattgcggaaaagttgatcaacaccattcatgcttttcatgaaaagcagttacctcatggagatctttgcccag |
| | | agaaactgctggtacaagtcggggagcagacagtaattactctgattggattgcttgaattcagtgatgaattaactgcagataat |
| | | cgctaccagccagagaatcccgaaagtactgatgcttttgggcgagattgctttgcagtatatcgtatggtggaggagctatttag |
| | | tgaagatatgccagtactggtgcaggctgagctagaacgcgcaaaacaaaccgttgacggtatacctatcgcgctcgatcctttgc |
| | | tgcagtcaattcgagcaccggaacaagctgagattaatcaagttgtggcgtctgagtcacaggataaggtaattcctgtttgctgg |
| | | ggcacagatgattggccgcaagaagtgaagcttctagaacaaaatgatgggatctattattttcaatgtaactggtcatctaaccc |
| | | acgctttgcgcatgaattgcgttgttacatcactggcctaggagagcggctattgatagacttagatcctgataatcgcactatta |
| | | atagaatagtgtatgaaaaaggattatcgatcgaagaaagtataaaggctggtaaatattcccaggctaaaattaatactcaactt |
| | | tcattacaacgtggctcacttaatcagcgtaatacttttattgaactactgtttaacctcgagccagtaattgatgccatcattga |
| | | gcgagctaatcctaatcaagagatggatgaagatgacttcgatagtagtgagtcaagcccaattgagttatggcaggcattatctg |
| | | atacagaagtagacctacgagatatagtcaacatcgactctactgactttcaggaatcaccgagtggttgcttactctacccatat |
| | | actacggaatccggtgctgacctcagctttgaacttgatgataagatcattgtttatattaaagataagcgtgaatcagtgcaatt |
| | | aggggaattgcagctaagtgagactacgccgagtctattggctattcgctttgattttgatgctgctcgtaagcgaattagtagcg |
| | | gcagccagctacaattggaatcgatccgtgacaaatcatcaagagagttgcgtcaaagagcccttcaacgggtaattgaaaacaaa |
| | | gcagagatccagcatctgccacagtattttgattaccaccagaaaccctgcatgcagcaaatgcaaccgcggccatccgcggagac |
| | | attacgcgcactttatgatcagcctggacaacgttttaatgaacagcagctaatggcatttcaacagttggtcgagtttggaccag |
| | | ttggagttctgcagggaccacctggaacaggtaaaacaacatttatttcaaaatttattcactatctgtatcaacattgcggtgtg |
| | | aataacattcttttggtcgggcaatcccatgcctctgttgataatgtagccatcaaggctcgagagctctgccatacgaaaggaat |
| | | ggaactggatacagtacgtattggtaatgaacttatgattgatgagggtatgctaagtgttgcaactaaagctcttcagcgacaga |
| | | ttcagcataaatttcaccgtgaatatgatctgcgagttagctccctaggaaagcgcctagggatggccccattattagtccaacag |
| | | ttatgtcagttacatcgtacgctgaatcccttgatggtgacatatggccaatatagccgtgagctggataaagtagaacaaataaa |
| | | gagtagtagtattagtcatcaagagcgactggctgaattattagaacaaagcaatcagcttaaactgcgaacacaagaaattatta |
| | | actcaatattcgatgacagcttgctgaaaactcttgtctatgatgaaaccttgataagacagttggctgagcaagttgccatacaa |
| | | tacaattataacaatccagagaaccttgaacgttttatgcagctattggaaatgagccaagagtggatggatgtattacgcggcgg |
| | | cgaggctggatttgatcgatttatgttcaaaagtaagcgattggtttgtggaactcttgttggtgttgggaatcgtcgactagaac |
| | | tagctgagtccagctttgattgggtaatagttgatgaggctggccgagcacaagctgctgaattgatggtagcgctgcaatcaggc |
| | | aagcgggtgctgttggtaggggatcataaacaattgccaccattctatcatcaacagcatcttaagttagcctctaagaaattaga |
| | | actcgggaaagggatcttttatgagtctgattttgaacgtgcttttaaagcaacaggcggcgtaacactcgatactcaatatcgaa |
| | | tggtagaaccaattggcgagttagtatcggagtgcttttacgctcaagatatcggtaaactgcattcatcgaggaaagtctcgcca |
| | | gattggtattccaagttaccaatcccttggaacaaaactgttacttggatcgatagttcgagccctaatgaagcaggtgcagaaga |
| | | acataagggtaatggtcgttactataatcaacgagaagtccggctactgctagaggctttgcagtcattgtcgagtgatggctgca |
| | | ttgcacagcttgagcaaactattaccacagaacagccatatcctattggtataatcacaatgtatcgtcagcaaaaagaggaaatt |
| | | gacaatgctatcagtcgggctgaatgggctgcatcgttacgtggtttgatcaagatcgataccgttgattcatatcagggccagga |
| | | aaacaagataattatcctcagtctggttcgcgataatcccaacaaactacaaggtttcctgcgcgacgcgccgcgaataaacgttg |
| | | ctatttcgcgagctcaagaaaggttattgattctgggagcaaggcgtatgtggtcaaagaccaataatgattcagcacttggaaac |
| | | gttcatgaatttattagtaaacaggttgcagtagatgaacccaactaccaaatcctgtgtggtcaaagtctgcttggagataacaa |
| | | ctaatgtcagaaccacgtctgggtaatctgattaccgttttactacctgcgcgtagttacaagatcaactgcgctttgaccactga |
| | | aaaactgatgcctggaattgaacagtttgcatgtcgcttgctgctgatttttgatcaactctatcccagcgagttacagaattact |
| | | ttggtctaactgatcgtgagcgagaggtattgcttgatgggttgctggctaacagactgatcaacattaatcctgatgggcatatt |
| | | gaggctagctcattcctacgtaagcatgcagctaataatggtgggaagccaagtttagttaaatatcaagaatgtacggaggaagt |
| | | tgcattcgatctactaactctttcgatatgtaaaccgcaaccaaatcgtcgttttacttctggactgccagagctattgccgcggc |
| | | atcagatcgggggagatgctgctgcggtaacagaggcttttagttcccagtttcggcaccatcttttgctcagccgcaacagcgag |
| | | tatgagcgtcaacggactaaattatataagataatgggctgtagttcgcatgagatggtgcagctcccaatagagatagaggttag |
| | | ctacggtgtttctgctgggagcattgagccgcagaaatttactcgttcctatgaatatttaggtaacacccggctgccgctttcaa |
| | | acgagctggaagctcatatcgcagattttttgggagaacataaactagatgaattcggtatcgactgtgaagatttctgtaaacta |
| | | gcaaatgataaagtgttgttacaatttgctaatggttataagttcaactattccggctggatagaggctcgtgaacaacgtaaaac |
| | | tggctacggtacttcattgactaccggcatgttaggggctgtttatttgccgcacaattctaagctgttcattagtatgttgcata |
| | | atgcattacgtgattatataggtaaaacagctccaaaagcgctgtggtatagcagtaaagtaccactgtggggagctaatggtagt |
| | | caactttcgcgttttactcgcgctctaggcgatatacttggcaattatgccgatgataagattgctcgcatttcgcttttacactc |
| | | aagtgcagatgaaggtgaaaaacgtcaagagcgtaagcggcacttaggtcgttttcctaccggtattggccttacttcagaggcta |
| | | aatttgatcgtttggagatcctcttaattcctgatgtgattgctttggtgcaataccacggtcaacctaattctgatagtgcatta |
| | | accctgccgattggttatataactgttgagccagagcgtttagaattacttaaaaaactaatgattaagcgaactgaaggggctgt |
| | | tgcaaccattacttggtctgaatcaaaatttgaaaatttagcttcgctattacctgttgagtttctgattaaactgaataagaaaa |
| | | gcggtgaagatgtggatgctgcaataaaaaaaatgcagatctataaccgtgctgaaaccgcacgggcaattttatcgctacgcaag |
| | | tagcatttatattgcaacgaataaatttttctaggttgctatgaactagctaaagggcaacaaatagataaacggcgttattcatg |
| | | tcaaatgagataatgttaaattgatagggatttataccccgccggccattttgaatggtcggagttgttataaacgtta |
| | | (SEQ ID NO: 50) |
| 54 | pLG056 | cgtgatgaatgaagcggctaaatacattaatgataattataatttaattcattaaaatcagtaatatataaatataaaagttgtga |
| | | aatgtgatattcgtcaaagcatgtcaaaaagttttgactgttctttaggcatcattcgcaattgtctaacaacttgataggatagg |
| | | aacaatctcaaaaaggaaaatgacatatggcatacgaagctcaaatcagccgtactaatccagcagcatttcttttcgtcgtcgat |
| | | cagtcaggttcaatgtccgacaaaatgtcttccggccgaagcaaggctgagtttgtcgccgatgctcttaatcgaactttaatgaa |
| | | cctaatcactcgctgcactaagtctgaaggcgtacgtgattatttcgaaattggtgttttgggttatggcggtcaaggggtttcta |
| | | atggtttctctggttcactgggaggacaagtcctcaatccaatttctgctctcgaacagaatccagccagagtagaagatcgcaaa |
| | | cggaagatggatgatggagctggcggaatcatcgagacagcaattaagtttccagtatggttcgatcctattgctagtggcggcac |
| | | gcctatgcgtgaagccctgaccagagccgccgaagagttggtgacttggtgtgatgcccatccggattgctatcctccgactatcc |
| | | tgcatgtgactgacggcgaatcaaacgacggtgacccggaagagattgccaatcatctacgacaaattcgcaccaatgacggtgaa |
| | | gttctgattcttaatatccatgtcagttctctcggaaatgatccaatcagattcccctcctcagacactggcttaccggatgccta |
| | | cgctaaactgcttttccgtatgtccagccctcttccggaacatctggtgcgtttcgcgcaggaaaaaggtcatacggtcggtatag |
| | | aatctcgtggattcatgttcaacgctgaggctgccgaactcgtcgatttcttcgacatcggaacccgcgcttctcagttgcgttga |
| | | ttcagcaatgaaactggagttcttagggacagttccgaaagatcctgaataccctaaggcgaatgaagataaatttgccttctccg |
| | | aagatgggagaaggctggcgctatgtgatggcgcgagtgagtccttcaactcaaagttatgggccgatcttcttgctcgtaaattt |
| | | actgcagatccgaaagtaaatcctgaatgggtagcatctgctttagcggaatattctgccacgcatgacttcccttctatgtcctg |
| | | gtcccagcaagcggcattcgaaagaggcagttttgcgacactaataggtgtagaggaatttgaagagcatcaggcggtagagattc |
| | | ttgctattggagatagcatcaccatgctggttgattgcgggaaactcatttgcgcatggcctttcgataatccagaaaaatttaat |
| | | gagcggccaacactgcttgctacgctgtacgctcataacaatttcgtcggtggaagcactttctggacacggcatgggaaaacttt |
| | | ttaccttgaaaaactcacccaacccaaactcctctgtatgacagatgcgctcggcgaatgggcactgaaacaagcgctggcagagg |
| | | attctggttttatcgaattactttcgctgcaaactgaagaagagcttgcagagttagttctgagagagcgtgcagcaaaacgtatg |
| | | catatcgacgactcaacgctgcttgtactatcgttttaacgcggaaagtaaagatgccttacccatctcttgaacaatacaaccaa |
| | | gcgtttcagctacatagtaagctgctaatcgatcctgaattgaaatctggtaccgttgccacgacagggttgggtctccccctagc |
| | | catcagcggtggctttgcactgacctatacaatcaaatcaggcgctaagaaatacgccgttcgttgctttcatagagagtcaaaag |
| | | ccttagaacgccgttatgaggctatatccaggaagatttcaagccttcgctctccctactttctcgatttccagtttcagccccaa |
| | | ggggtcaaagtcgaaggaatatcataccctatcgtcaaaatggcatgggccaagggagagacgctaggagaattccttgaggtcaa |
| | | caggcgttctgcacaagcaatagcgaaactatctgcatcgattgaatcacttgccgcctaccttgaaaaagaaaaaattgcacatg |
| | | gtgatttccagactggaaacctgatggtctccgacggaggtgcaaccgtccagttaatcgactatgacggcatgttcgttgatgag |
| | | attaagacattaggaagctcggagttggggcatgtcaattttcagcatccccgtcgtaaagcaacgaatccgttcaatcacactct |
| | | ggatcgtttctcactaatttcactctggctggctcttaaagccttgcaaatcgatccgtccatttgggataaatcaaattcggaac |
| | | tggatgcaatcatttttcgagctaatgactttgtagaccccggttcatcttccatcttagggatgctatcgggaattcaacagctt |
| | | tccacccatgtaaagaattttgccgcagtctgcgcttcagcgatggaaaaaacgccttccctcggtgacttcattgcaagtaaaaa |
| | | cattcccatatcgctagcttcgatcagtatgaatggggatattccagtcagcaggctgaaacccggttatatcggtgcctacaccg |
| | | tcctgtcagccttggattacagtgcttgccttcagcgagttggtgataaagttgaagttatcggaaagattattgacgtcaaactc |
| | | aataagacccgaaatggcaaaccatatatctttgttaatttcggagattggcgcggtaatatctttaaaatatcaatatggagtga |
| | | aggcattagcgctttaccttcaaaacccgatgcctcatggatagggaaatggattagtgtaatcggccttatggaaccgccttacg |
| | | ttagcgggaaatacaaatattcacatatctcaattacagtaacgactatcggtcaaatgaccgttctttcagaaccagatgcccgc |
| | | tggcgtcttgctgggccaaacgaaagtcgacaaacattaacttctactagcagtaatcaggaagccttggagcgcattaagagtaa |
| | | gagcaccacttcaactcctatgcccatgaacactaacgccacaactgcaaatcaggcaatccttaacaagttacgggcttctacgc |
| | | aaactgtagcggcagcaagagcgcaaactcagcatgtagtacctaataaatcatcaacgcattatgtggcaccgacgggaacatca |
| | | gcttcgcagccagttcaaaatattccgagccctgctagtacctcaaagcagcaaacctctcaaaaaaatatagttacaaagatttt |
| | | gaaatggctttttggatgattggtacttgtaaagaacaagcgcaatttcagtggccgtatcacttgcgcttgaggtgcctgcgggt |
| | | atgatcttgcgacatacaccactaaaacgaattcgtggcggcacttttagcctgcccctgtgttttcccgaggatttac |
| | | (SEQ ID NO: 51) |
| 55 | pLG057 | ggggcgaaaaggggaatgccggtcattgccggacgagtgcaccttaaaatgtgcggcagggggcgcccgcgggctgatccatttgg |
| | | cagaatggccgtgcatgcgacgatcgagcgcgggagacggctgaccctgatggacaaacgcgctttgagcgagcgggacatctgca |
| | | ctaagttcatcacgtcgtggcttgacagatgtttgccttgaccggtcgaatagccccattcggggccgtgtactttgcaaatgggc |
| | | cgaggtgcccgaaaaaccggtctggagccaggacaagaattacagtgcgcgaaccccaccggttactcacagcccgcttattggag |
| | | ttgatcgaaacccatcccgaaggattgcgactcgacgaggttcaggcgcgtacgcgtgttgaagggtgtcgcgcgggagtcgatga |
| | | tctcgcagcagcgctactcgatctccagcaccaaggtcttgcacatataaacgcagcccggcgctggtttccgaagcgggcggcga |
| | | gtgtacgaccatcctccgcagtcactggttcggatgacgtggcgggtgcagggctggtgctgcaggcgctaccggcgcgcatcact |
| | | ggcaacgatatggcggtagcaccagcacctgcattgagtgctaccggcacctcgctcaagccgacttggggcctgttacgcagcct |
| | | gctgccgtattacgccgaggcgctagcccgcaatgaacgggcgttgctactcggaacgcctgagcgctacggcgagcagttcctgc |
| | | tcgtggcaccacgcggccgatggtggccagcagcagggttaggctacgggctagaactctcgcgtacgcatctgccggttgctttt |
| | | ctcaccgcgttagcccgacgcacgcgcgaaccgattcatgtagcctaccccatcgcgctggtgcggccccgcgacgccgcgcgcag |
| | | cccctttctgttaccagtggcaactgtggcagcggactggaccctcgacgccgagaaactgcgcctgaatctgccggcccaaacgc |
| | | cggcgatcgaatggtcgtgggtgcgcggacagcgccagcgcggacgccagattcgcgagttgctcgatgcacttgatgtcaatgct |
| | | gacgacgaagtctggcgggcaggctccttcgtcgactgggcgaccttcgtcgatcgtctcgctgcaaccacccctaccgaggtgcg |
| | | cacaccgctcgatctcgctcagcccaacaatgagttggattgtggccaggcgggcggtatttacggggcgttggggctgttcctgt |
| | | cgagcgaattgcagttcgcgcgcggggcggtgcgtgatctcaagtccatgacgcagtggtcagatgacgagctggccacaacggcg |
| | | ctggctgcgtgcttcagcgatgccatccacaaggcaccgaatccggtcatcgttccggtgctggagccgcttgtgcttggcgagga |
| | | tcagcttgcggccgtgcgtgccgggctaaacgatcggctgaccgtggtaaccgggccgcccgggaccggcaagtcacaggtcgccg |
| | | ttgccctgatggctagcgcagcgcttgtcggtcgcagcgtcctgtttgccagccgcaatcatcaggcgatcgacgcagtcgtcggg |
| | | cggctggccgaagtagttgaagaccggccgctggtaatccgtgccaatgcgcgcgaaagcgatgacagcttcgactttacccgtgc |
| | | gatcgaagccatcctcgcgcggcccggtggtgagaggcccggcgaagggctggctggctcgatcgaagtgctgacgcggctcgatg |
| | | cggcacggaccgctgcgatcgaacaggccgccactgctaaccaagcgatcaacgaactcgggcggctggaagcagcgatcggagat |
| | | ctgacggcagcccttggcatcgacgcagccgctccactaccgcgggatctgcccgctgccacacgacccttgcatagttggctaga |
| | | gcgcctgtttgcgccttgggtacggtaccggcgactacaacggctacggcgtctagcgctgggatggggccagcttggttttggcg |
| | | agtgcgacgaatcgacgctggagctacacgaacaacgtctactcgacctgcaggagctggctgcgctgcgggtcgagcgggatcag |
| | | gcagaggcagccgtgcgtcaactccgttcaaccggcgatccgatcgcgctcggagagcggctgtgcgcttcatccaaattgcgtct |
| | | gcaggggctcgccgaactgcttatcgagtgtgcgcctgaagatcgccgtgcgttgaccgcgttgcgcggcgatctggctctggcgc |
| | | gcggtgatggcgccgccggtgctgcccgtgctcgggaactctggtcggctcagcgagccctgatcctcggccagatgccgctatgg |
| | | gccgtgtcaaacctcggcgcagccagccgcattccgctggtacccgggttgttcgattatgtggtgcttgacgaggcatcgcagtg |
| | | tgatatcgcttcggctttgccgctgctggcccgggctcggcaggcgatcgtgattggtgatcccgcgcagcttacgcatatctccc |
| | | aagtgcgccgggagtgggaagccgaaaccctgcgcaatgccggcttgatgaggcctggcatcggcagctatttgttctcgaccaac |
| | | agtttgttccatcttgctgctgctgccgccggcgaccatcacctgctgcgcgatcacttccgctgccatgaagatattgccgacta |
| | | cattagtgccacattctacggcaatcgcctgcggccattgaccgacccgcgtagcctgcgggcaccagtcggacaggcagccggtt |
| | | ttcactggacgaccgcgcccggtccgatccaaccagcccgcaccggctgctttgcaccagccgagatcgaagccatcgtgcacgaa |
| | | ttgcattggttgctgggtgagggcggcttcactggaagcattggcgtagtcacatcgtttcgcgaacaggccaaccgtctacgcga |
| | | ccgcatcgagcattgtttgagtgccgaggcgattgcaagcgcacgattggaggttcacaccgctcacggcttccagggcgatgcgc |
| | | gcgatgtgattctactcagtttatgtatcggtccggatatgccggctggggcgcgagccttcctgcacgacacgggaaatctcgtt |
| | | aatgttgcggtgagccgtgcccgcgccgtttgccatatcttcggcaacctggagtatggagctcactgcggtatccggtatgtcga |
| | | ggcactgctggcacggcgccatcgaacaggcgatgccactgccagtttcgaatccccctgggaagaaaagctctggcgcgccttgg |
| | | ctgagcgcggtatcgagacaacaccacaatacccgattgccggtcgccggcttgatctggcattgctgaccgacagtgtgcgtctc |
| | | gatattgaggtcgatggcgaccgttttcatcgcgacctcgacggtcggcgcaaggtgggtgatctatggcgagatcatcaattgca |
| | | ggcgctcggctggcgggtcgtgcgcttctgggtttacgaactgcgggagaacatggatggttgcgtcgaacgcatccttgtccaca |
| | | tccgaagcaccgattactgagcatcaccgttccccaccagcagcagccgtgccaccagcgaattggcggcgaatgcaactcgtgct |
| | | cgggctggccggggctctggcgctggctagcctcgtcactgtattggtgggtgtaatcggcgacgccaccgaacgcgagagttggc |
| | | gagtacggcgtagcgagcatcaggaggtgctgggcgcgctcagcaccgcacgtgcccagcttgatgaggaagtcgccaacctacgc |
| | | cgtaatcgtgctgcgctcgatgcagacctgaatcgtctccggaccagcgccgaagctgagcagggcggcgcagcacggctgcgtga |
| | | ggaagtcgccgcactacgccaggagctcgccgccggccgcgccgagttggctgtggctacgcagcggcgcgacaccctgcaggctg |
| | | cagtgaagacggccgatacgacgctggcggaactgaacgcgcgccgcgatgaggccgagcgtcagaccggtgaggcagcagaacgc |
| | | cggcgggtcgcggccgaagccgagcgggccgcgaaggcccagcagagcaaggccgaacaagcccgcgacagtgcggttgcacagca |
| | | gaaggaggctgagcggcgcatcgagcagatccttcaggacctgaaaaccgccgaagaacgagtaggtggactgcgcacgcaagagg |
| | | ctcaactaaaagcggctacaactgcctccactgccgaacgtgaccggctggatgctgaagccaagcggctcggactggagcttgtc |
| | | aagctcgatcagcagcgccagcagcttgagcgcgatacccgtactaccgccgaaactcgacggacggccgaggggctccagcagca |
| | | gctcgaccaagcgaaccgggatctcggtaccgtccgcgaagccctgaagaccgcgcaggggcagctagccgaaacgcgcggccagc |
| | | agacccaactcgccgacgaactggcccggctgcgcgcacagaaaaccggcctggatggcgtgatcaccgcggctgctaacgctcaa |
| | | gcggaacttgacaaactgcaggctcagcagaaacgggcggagcaagcagcagaaacgacgcgtctcgatgttcgtcagctcgaatc |
| | | tcggaaaacggcactggaagccgacatcatcaaattcaccgccagcggcaaggatttggaaaagttccgtgccgaactggctgata |
| | | ccaatgcagaactcgaacgtctgcgtcagcaattggttgaggcacggagccggcgcgagactatcgcgattgaagtggaacgccta |
| | | acgcaacagcgcggcgaactggagcgcaccatcggttcactaacgccgcgagcgcaggaggccgaagcgctacggatccggctcca |
| | | gcaagacaacggcactttgctcgccctgcgcgagcagattgaacgcttgcgcactgaacgtgacagcttgcagcagccggtcacat |
| | | cttccatgcatgtccccggcgacaacgccgcggcacgctgatcaaggatcgcgctgatggacacgaacaccctggtctggcttgca |
| | | tcgggtggcacgcttgccggcatcgtcagtgttatcaccgcattggtgtgcggcatgcactacggtgcggcgctacgccgcatacc |
| | | ggctgcggcctttttggaagatatcgtcgcacgcgtcgcaactcgtcgcgaggaactcgaacggctggatgcccaattgggcgagc |
| | | gccacaacggcctccagggcctgcggggcgaaacggagatgctgacggcccgccgggatgccttggcagcgcaactgcgcgaactg |
| | | caggaggacctggttgcactcgatgggcgccgggccgacatcgcttcggtgcgcgatgagttggcggaagcacggacgcaacttgc |
| | | catgctcgtcagtgaactgaccgaacggcggacgcagcaggagcaactcgaacgcgcggccgaacgtgcccgtgcacaactgtccc |
| | | tgctcgaagaacgccggagcgagatcgaggcaatcgatacagccgagcgcgaagcacggatacggctcaccgaggcgcagacggaa |
| | | ctgggcaccgtcgtccaggcgcgggaagcggcacggcgtgaagccgaggcggcagcgcgcgacagggagatgctggcaacgaacat |
| | | cgaccggctcaccgatgagcgcaacgaactgcgcgctgacatcgccagtctccaagccgaacgcaatccgctgtcgactgaagttc |
| | | agggcctgcgccggcacttggagcagttgcatcttcagcagcaggcactcgacggcgatcttcaacgcctgcaatccctacagccg |
| | | gtactggaagataaaatcagcggcctgcaacaggaagttgttacccggaccgctgaactcaaagaccttcaggccgaacgtgatcc |
| | | gctgtcgactgaagttcagggtctgcgccggcacttggagcagttgcaccttcagcggcagacactcgacggcgatcttcaacgcc |
| | | tgcaatccctacagccggtactggaagacaaaatcagcggcctgcaacaggaagttgttacccggaccgctgagctcaaagacctt |
| | | caggccgaacgtgatccgctggcagcggacattgatggcctgcgtcggcaactcgaaccgctgcgtacacagtgcgacgaagtcga |
| | | agcggaactcgcccgccgccgcgccgaactcgccgcgatcgagcaggagatccgtaccaaaggcggtggtagcgtcggcaacccgg |
| | | aagacgtgctcgccgatctcgaacaggcaccggcttgtctggtcggcgacggcggcaggggaccgttgatgccgaatccgcagcgc |
| | | gacgacgacgaaacagcaatgctcggccgcgtgcggacacaccttgatcggctccgtctgcactttcccgagcgcactctttatgc |
| | | ttttcatactgcgctcaagacggcaacgattagtccgcttacagtgctggccggcatttccggtaccggcaagagtcagctgccgc |
| | | gccgctatgccgaagcaatgggtatccatttcttgaaactgccggttcaaccacgttgggatagcccgcaggacatgctcggtttc |
| | | tacaattatttggagaagcgctacaaagcgaccgaatttgcacgggctctggtgcatttcgacacgtacaactggccgcttgcccg |
| | | gcctttcaaggatcggctactgttgatcctgcttgacgaactgaacctcgctcgcgtcgagtactacttcagcgagtttctgagcc |
| | | aactcgaaggccgtcccgccccgggcgatcgcgatcctgagcacatccgcagttcggaaatcgtgctcgatactggcggcgttggc |
| | | ggaccgccgccacgcatctatcccggccacaacctgctgttcgtcggcacgatgaacgaggatgagtcgacacagacactttccga |
| | | caaggtgctcgatcgcgccaacctgctgcgcttcccgcgccccgaaaaactggccggagaaacgctggcgagcggcggcgagccgg |
| | | cggaaggcttcctgccggcctctcgctggcatgcgtggcggcgcagttttggcacgctgccggcaacgctgcgcgaaccagtcgaa |
| | | cgttggatccacgatctcaatgagcatctagacgggctgcatcgaccgttcgcgcaccgtgtcaatcaggcgatgctcgcctacat |
| | | cgccaactatccgggtgtcgccgagccgatggcgcaaaccagtcctctggatcaggcccgcattgcctttgccgatcaactcgaac |
| | | agcgcattctgccgaagctacgaggcattgacctgggtgactctggagtcacccagcacctcgaccgcatccgtgcgttgatcgac |
| | | aacgagttgcatgatgcaacactggctcgcgcctttcagcgcgccgcgcaagatgacggcagcggcaggccgttcgtgtggaaagg |
| | | cgtacgccgtgaatcgatatgatcccgctggtgctggctatgccatggggactactggcacagactccgatcgccggccagccgac |
| | | gcgccgaccgttacatgacggtgaaacggtcgaactcgatgggcggtacggtgccatggtggcgctacccgagcggaccgacctgc |
| | | aactgggcagtcggcgctggccggtgcaggtggaaggtgccgcctttgcctggttcgagggatcctttcggttggtgtcgctgccg |
| | | actgcagccttgaccagcgaacgtcagatccggttcgatcttctaacggcgggcgagtctgtgctgagtgtcgggctcgtgttgcg |
| | | taatcatctactgcgtccgcgcggagccggacgtgacgatccggccgccgatgcattgcacacctttgtgttgcaggttctcgacc |
| | | gcatccgtgaggccgaaccgtccggtgccggagacgattgggatgatctcggcaccggttgggcgcggctgcgcaccgcctggctt |
| | | gagcgcgatgcgcagatcgaagaagcgcgccgcgatctgatcgtcgaacatgctgaacaactcccggcccacatcaca |
| | | gaaatcgctatccacccgcgtcgggtgctcaaacgcacccgcgagttgctgccgatcgatcgtatccaggaactcgacaccgcctg |
| | | tctcgaatggctgatccggcagcccggcgttaccgttgccgaaaaggccggtccgcgccagcgactgctcggcatcgcgcgcgagg |
| | | agcatctcgatacgctcgaaaaccgggtgctgaaagatttcctgcgtctgagcgtcgaggctgccagcgtctggcagcgggagaac |
| | | cggcgttttcacaacagtgagcgcgcccggctggtcgggcgttatctcgcgctgtgccgcatgcatcatcgcgaactgtgcgcggc |
| | | tggcatcggtgaccccatgcccccggtcgctccgaatttcgtgctgcaacaagattcccgctaccgcgtgatctggcgcgcgtacc |
| | | gcgaactgttgagcgctgagcagcgtatggacgatctctggcgctggcagtgtcggttgtggagcgacttcgctcggcttgtcgtg |
| | | gtgatgggggtgcaagagttgtgcgacaagccgagtgcgctctcgcccctcttcgtgcgcagggaacaggcaagcggacgctggtc |
| | | ggacacgctcggcctgctcggtgtattcctgatcgacctgaacggcaggtcgtatgtggcggaagtctgtgatgcgagccagttgc |
| | | cccgaaacgacacgtcacgagcgaagctggcgtcctggcagtatgcactcggttgcacagcactcatccgcctcatcgatttgtgg |
| | | agtgggcattgtgcgagcctgtgtgtctgggccatgcatagcgctacagccgagacgcttccgttgaccgagttggtcgcttcagc |
| | | cgatgaagccctgagtacggccatcagacaggaaggtctgcgcaacggcgagcaacttcgggcacgtggactggtgatccgctcgg |
| | | cgccgccgggaaagaccgagtacgccacccaggctgggcaggtctacggactgacgctggccatcgggtcggaacatatccgcgag |
| | | gcgcttggcgagtgcactttgatcctgcaggacagtctggagcgcctgtttgcatgagcggagtgcacggcattgatctcaatggt |
| | | gtgctcgattgcgtggtgcgcctcgatcgggcaccgcgaccagcgccgacaccgccggtgatcgtctccggttcaccacagggcct |
| | | gctgacgggagccgcggcactgcaatcgccctgcggccgacctggcatggaagccgaggaaggtatccgcctgccagtgctggccc |
| | | tgctgcacgcgctcagtggtgaggggcggcacgatacgcacgatacggccgtgctgctcggccgacacctgcgtagcctgttgtcc |
| | | gatgatacgcatgctgctgtcgtcgcagtgcctgacacacctggtttcgacgaacgagctcgcacccggctgctggatggcgcgct |
| | | acgcgccgggctcgatctgcacctactatggcgcccggtcgcagcgttgcttggttggggcgaaacactgggaaacggcgaactcc |
| | | aagccctgcacggccggacggcctgcgtcgtgcagttgttgccggacggcatctcgattggcgatttcggcctcgaatgcgtggtg |
| | | cagggtggccggccgacgttagtaccggtgcgccggcgcgacggcgaacgtcaattttactcgtggagcggtggtggactggttgc |
| | | actgctcgcgcgcgaagctggaaccgacgaagccagtctgtgggtcggaccgtgggtatggaaggtcttgcttgggcagcctgcag |
| | | aacgcgaggtgctggccgacccgcatgcaccgggtggttggcgactcgccagcggtccttccacactgtgcggcgccttagccgcg |
| | | gagttgcgcacaggcctgcgtatagcactcggagccgcgcgctcggcactgcgcaatgcagcggtcaUctgatcgaggggcctatc |
| | | gccgatgcaccgcUtcggacgcaatgcagccaacactcgcgctacgccagatcgtggctgcggaactgaccgtggtgctcggcccg |
| | | acggtgtccgcaagactcgtcgccatgccgctcgccgatgctctaattgccagaggggccgctatctgtgctgcgcgtcaagcggc |
| | | gcggcagatcacgtattacgatttcctgccgatgctcgaaatcaatgtgctgcaggccggagagcatgcgttcgttgaactcatcg |
| | | gtcgcgaagagcgcatcgcggggggcatgagttacacgaatacgttggccgatcgcttcaccgttgccgcaagcacgcgctcgctc |
| | | gagttctacctgctgaaagaggacgaagcaggcgctcgtcacagcgaaacggtgctgccggtaccgccggcagccgacgtggaaat |
| | | cagcctgcacgtcacgcagacacccgctcaaggctacgcacgcgtggagatactctcggccgtccggggcgcgctcggtgaagcac |
| | | cgatcctgctcgattggtcagcgatgacagagattgaaggctcgcgcgaggatattctgcgcgaactcgaattcgaggggctcggc |
| | | tatccggacatcgtaccgcaacgtgcacatcacctgctctgggattaccagcgcagtgacggcatgactatcgctgccgcgatgcg |
| | | ggccttcaattgtaagcctatcctaagttcaccgcgcaaccagtacaatcaattggttaaacaaacgcgcgcactcgtcgggctgc |
| | | gcagcaatctgttttttctgacaaagggcaccagttctgatcgtagtgcttacaccgccgtcgattcggatggccaattgccacct |
| | | ggaatcgcgccgacaatccaacaggaattcgaaaactttcgagtgcggctcgacacggattttgccgcaatcaccagcgtccgtaa |
| | | tcgacaagatatcgcaacccggcgtgaattggcgcgactgggcgcctgcttgtatgcagcgtgtcctaatgcaattgttcattact |
| | | tccaacgcattgtcgcacgtagcgccgatgacctgacactggtgttgcatgccggcaaagtgctgagcaccgaaccagatcttgac |
| | | agtcttttccattattgcgcgtctcgctacgatgaagccatccgcgctgtcaagagactgtcggtccacgtggtacgcgcggcagg |
| | | cgatgctttggcttatcatgaaaaagctggaggcattcttgataaccgaagcgctgacaagttggctgaagctgcgctcctattgc |
| | | taaaggaggaaatccaggcacataattacaaaatacgattccgtgccgccgcgcgactcggcctatttctgttacgccaccggcag |
| | | cggcggcgcgatttcctgcatccgagtagcgctgacacggctaatcgtcggcgtgccaaagagttcgatgccctgttgatccaggc |
| | | tatcgcatcgaagcgccttaaccaagatctggaaaatgccttggaagaaatccgtgcacaaatccgatatcgcggtacaaatgcga |
| | | tcgttgatatcgatcctgacgaagatggcgagattaacgagaacgaagtggagtagaggctgttgggcacccgctcgccatccctg |
| | | tcgagcatcccggcttcgcgggcgcccatcccgtgcctttacggcgtgttcaacggccccggttcgccctgcgtatcgggctcctg |
| | | ctacgcccgtcgagacgcgctgcgcagactcgacgctcaaatggcttgacgccattctccctggctacc(SEQ ID NO: 52) |
| 56 | pLG058 | tcgcgatcaaggggtgagcaggggataaacgcaaagacattgaagttgaggagaatttagttgccttacctgcgaaaaatctgagc |
| | | gatcttgcattaaagattttctatctcaggccgatgctcataagagcatttcctgaatttcaccctttttttgctcgccatccctc |
| | | tgcgaataaggacaccgcgccagatatgtcactcatcacccatacattagaaaacctcacaaaagccttgcgtactgcgttgcgtg |
| | | tctcaattgaatgcaatgagcgcagcgaaaatacccataaaattttaaacgtgttacgtcaggttgagctgacgctgatgctgcat |
| | | caacaacctatctatgccattgccggtacgcagggagcgggtaaaaccactctggcaaaaagcctgctgggcattgacgatagctg |
| | | gcttgaggcgaatccgggacggggcgagcagataccgttatttattgagcaacggcacgatgttcagggtgattatccgcaattta |
| | | tttatgtctgtgctcaccacaaaaccggtgaaatttttgacagccagccgcgcagtggcgatgagctgaaacagatgctgcgtgac |
| | | tggtcgcaaatggtgaatcaggagatagaagggggcaaaatcctctatccgaaattaatcattaataagtcagacagttttattga |
| | | tgaagagatggtctgggcgctgttgcccggctacgagatcagcaacagccagaatcatcgctggcagggcatgatgcggcatgtca |
| | | tggtcaacgccagaggcgtgttgctggtcactgacccgacgttaatggcaaatacgaaccagagcctgctggtgaacgatctgcgc |
| | | agtgtgttcgccgatcgttctccggtgattgtcgtgaccaaaacagaaagcctgaacgatgcggagaaggccgaggtaaaagcgag |
| | | cgctgccgcactttttcatgagacctcctcaccggtggtcgctgccggtgtcgataatcaagcgcagtggataggtgagctccgca |
| | | ctgcatttgctgagggtatccataatagcgccgcgtcagaagcggccgcgatcgaacgtttgatgactctggtcaatgacgatgtt |
| | | gcggatattattgataacctgaatctgctgtacgcggagcaggacagtggcgaggaacgtaccgtcgctattcttgaagcgttcga |
| | | taaagcagccgagcgctatgaacagcaactgcgtaaagccatcaaacgagaaactgacgggcatcggcaaaaagccactgaatctt |
| | | gccagcgccgttatcaggaagaagaagaagggccggtcaataatttaaaaggactcggtcgtcgtctgatgtttcagggggcggag |
| | | attgatcgtgaacgcaaaaatcgggtactggacgcctggcaaacccgctttgagcagcaatctctggccgatcacaatatggtcgc |
| | | gctggaaacgctcaaccgtcgtgagttgaggcattacggtctttcacaggagacgctgtcaccccaacggttgacctcgcccgcgg |
| | | cgacaatgggatatttgtcggtggctgaggaggataatttttcctcgctggcccctttgcgccatctgctgggatcggctgcaaca |
| | | agggatgcgccgccgcagttagaccagctttccacggtattaaaagtgctgcctgccatgacgatggaatatgcgcgcggttgggt |
| | | ggcgatcaaccaggcgatgcccgcagcgtcagagctaaccagcgagttgcggccacaacaaattctcgacgcgatttttagcgcgc |
| | | agagtagcatccacccggtgaaaaccgcgctgatggcgtttatcggtgccgacgccgcggacggcacgctggatggcgaagtgggc |
| | | actccgcagaatgaagatagcggcgtatttacgcctgtcgcgatagcaggcaaagcgatgctggtcggtgcggcggtttatgcgtt |
| | | gtatcaggtggcgggcgtggtgagtgagagtgataaagctcaggcctggtatattgaacggatgatgaaggaactggcgcaatata |
| | | atgaaaacgtcatcatcgagcgttatcaggacacgatgggcgatctgcgtcagctgattgaaatcaacctcaaccgtttatttggc |
| | | gtgcaggatgtcctcacgcagaaaagctatctctggttagctattcagggactcacgacggtacaaaaggaagcccggcagtatga |
| | | agccagtatcaaacaatatctggcgtgatatttgccatgagcgttatcgatgggcggaaaatagctacatcaacctgctgcgtcag |
| | | gttgatgccgagcggttaatccagcctcatgcagacatctcccgccagatatcggtcattgtctatggtccgacgcaggtgggaaa |
| | | aacctccctgattctgaccctgctgggcgtcagggatgactgttttaaagaacttaaccagctgctgcgtggtgggcaggcattag |
| | | gtcacgcgtcaacggcgcgaacttaccgttaccggatatcacgggatgatgcctggtattttagccacaaagaccagggaacaacc |
| | | gcctggtcggatagcggggcggcagatattttcgccagcctgcgtgcagaggttcaggcgggcaggcgctactttgacagtatcga |
| | | cgtatttattccgcaacgtttcttccatcctcagcagcggcaaaatggtttgttaatccgcgacctgccgggtattcaggctgcgg |
| | | atgacaatgaaagggaatatgtgactcagcttgccagccagtttattcgttctgcggatgtgatcctgctgaccggcaaagcggat |
| | | tatttaggctttctgaaacccgaggagttgggtaatgacctactggctgactggttctggcagccacatcgctacaaaattgtatt |
| | | aacccggacttttagcaacagttccattcgggaaatgttgcgccgtgtttcccccgataaatcctggctgcaggcttatttgtttg |
| | | agcaaatcaatacgctggaattgcaacttccggcggagatgcgtcaacacatttatccgctcgaatgcggtcactcctggcaaacc |
| | | ctgattgaggggggtgacgattatgctgactattgccaacggttgcgtgagcagatattaaccgacctgcgccatcatatgttgca |
| | | ggcggtccatccactttctcgtttacgtacgggatacgccttacctgaattaattatccgccaccgggacaagttgcagcagcagt |
| | | acacagcgctgcacagcacgctggacaaagaacaggaatattacctgcgtaaaaaagagcagctgtcgtctgtgcagactgaatat |
| | | tcccggcatctggcaaagagccagacacgactggacagattgcagcggctacgggaacggctgaataaaagacaggcgcgcaacgc |
| | | gcatcaatccatcgctgtgccaccgatgggcacaagaacggtcagtgccttactgaaaatgattgctgaggcaagagaagagatgg |
| | | cgcttcatccggcgttaaagcaccttcctgcccatttcgctgcgcaacagattaaccaccatgccttcacggcgattgagcaaaag |
| | | ctgcatggctatcatgcggataattatctctttgccagcaactataagcatgactatcaggaaacgatcaacgcgatcaaacaaca |
| | | cctgaaactgatcaccacattagccgctaatttccagcgtagtgagctggagagacacatcaaggaacatcgtcgtcgccagcaac |
| | | gtttacaacaccacaccacccggcgagacaaactcctgacggcagtgaccaataagcttacgcgcatcaatacgcagcaacaggaa |
| | | ttaacgcacagccatatgcgtgacgaggatcattatcagcagctgattggcgagagccgtcgctttcaggaactgatcagagtggc |
| | | gaaaaatgaacgagccaccctgattgaacaacacattaggcgtacggatattggtcaggctgagcgactggcctggctactcgctg |
| | | cccgtgcgttaaagaaagactacgaatatgtcagagcattaggagagtagtgcatgtcagtggaacatgacccggttattgcgcag |
| | | gataatgacgagcggatgctggatgaattggtgcaggaactgtttctgaccttgctgacgcgtgagctggcgcaacagaaagcggt |
| | | tatcgaaaccattaatgacaacgtctcgtatcaggctggtgagtcattaaaatcgttgaaacgggagatcaaactttccatcagca |
| | | ccctgtcgaatgcgcaacagcaatatcaggaagagcaggccatcgccagggaggaatacgagaagcggctggagcagcagactcaa |
| | | acatttgccagtgatgcggaaaaaaatcaccaacagtcacagcagcagatggcagcacttcggcaaggtgagcagcagctggctgc |
| | | acagttaacagatttgcagcaacagcatgccacacttcatcagcgctcaggtcagatgctgaatagcattaaatggctggtggtgg |
| | | ggctggggggcgtcaacctgctgctgtttgcggctgtcatcatgatgttttttctcgggcatcgataatcatccgcgcatgcaggt |
| | | ttgtccggatatggtgcgcctggtgcaccatgacttttctctggcacggataaacggacgcacaggcagcgaatgacgcgccctga |
| | | ataaactggcacaacttctgcattcatttcctcaggcttgtatacaaggccgcataccg (SEQ ID NO: 53) |
| 57 | pLG059 | cgcatctgtaatgcaaacttattagacttaatccctataatgcaatataaatcatattgttaccttgtggctcctttatctgattg |
| | | cacggatttatccctcgcgtacttattcagcatgatatagctgggtatcatgtgcctactcttaacctgaatgaaacttacaaacg |
| | | ttcgtggtatccacatgctaagtgaggctgagatagcaaaatttctcatatggttgctgcccctaagatcaacaacgcactgagca |
| | | tgactctctggacaaggtgccacacaccaggcgcacgtctaaaaggaaatatacatcaaatacctgattgctaagttataccaagt |
| | | ggaaatcgggtatagtaggtcaaaacgaaagcgtgtcttaacactgcatattaacgatcaggaaggtcttagcatgtcaattaata |
| | | tcaatacgttgcataatcttcgtcgcgcgttacttactgcgctggagctctcgattgagcacaatgaagaaacagaaaatgtcgat |
| | | cacattactgatgttctgcggcaggtggagttgacagtacttttgcagcaagaatccatttacgccatcgcaggtatgcaaggggc |
| | | aggtaaaacaaccttggcgaaagcgatccttggtattgatgatgaatggttagatgccaatccgggtcgtggcgaacaggtaccgc |
| | | tttttatcgaacaggtggatggcgatccctccgattttccacaagttgtctatcagtgcctaaaccttaaaacaggcgaaattgct |
| | | ccgcaaaagggcgagggtggggagcaacttcaaagtctgcttcgcgattggagcagtattcgtcgttatgaaaaagcgggctttaa |
| | | actgctctaccctaaattgctgatcagtaaaaaaaactcgttcatcaatgagcaagtgacttgggcgctgttgccgggctatgagg |
| | | tagccacaagtaaaaactatctctggcaggatatgatgcgccacgtattggttaacgcccgtggtgtcatgttcgtgaccgatccc |
| | | tctctcttagccaatgacagcaaatccgcagtgctgcaagatttgcgagataacttcaaggaacgcggcccagtggtggtcatcag |
| | | caaaacagagatgctcggagaacatgaaatcaaacagctcaaaaccagtgccgctgaacgtgttttccccaatgttgggatgaaaa |
| | | aagaggatatcgtagctactggttctggtaataacgacatctggattgatgcactacgtgacacagtcatcaataagctcaccagc |
| | | agtgcggtatctgaagcaattgcactagataacttcatgggacttatccgcgaagacgtggccgaaataatcaataatctgaagat |
| | | attggcggatacacagcagcatcacgaatccatagtggatgagatcctagacgttttcgatgaatcagcctccacccatgagcaaa |
| | | aattacgtgaagcgatcaaaaaggagacccgtcagcactttactgatgcgcttaagtactgtgaaaaaagctataaaagagaagag |
| | | gtaggttttcaaaaaaacctcaaaattttcgcccgccgactgtcgtttcgcggcatagaagtggatgatgagcgcagtcaacgtat |
| | | tatagatgcttggaatagacagtacgaaaacatcagtattcacgaacataatttcgacgcactgacgtctgtgaatacccgggtgc |
| | | tgcgtgccaaggggctattgcctgtcgttgaaaatcagcaactattaccgggcagcgcagtcgggagaatggggtatctggttcag |
| | | gataaacaagcagagtactcaataatggatcctgacctgatgacgggtttgtatacactgctcaaaaagccgggcggcgctcatca |
| | | agcaccgccgcctaaaaaactcgctgcggcgctggagattatgcctgctttaatgctggaaaacgctcgtactaggttggcaatgc |
| | | atcttgacccggcctgcacaacccaactggcagaggagatccagcctaaacaaatttttgatgcgctcttttcgagcagagaacag |
| | | taccatcctattaaaacagccatgatggcgtttttgggtgctgatgcggcagatggaactgtagacggtaagagcacgccaaatac |
| | | cgaggggggattcgctccgctagcgctggtaggtaaagcggcattggtagcaagcgtggcttatggcatctatcaactaacaggag |
| | | ttattcgcgacagcgataaagcgcagatttattacattcgtcgtgtgatggaggaattgtcattccataacgaacagaccgttatt |
| | | ggcaattataaggagatgattggcgaattgcgtgattatattgcgtataacctgaagcaaatatttggcgaaacggatgccctggc |
| | | aaatcgaagcgccttgacgcttgccattaaaaatcttgttgccgcacaaaaggaagcaaaattgtatgaaactcacttccgaaaaa |
| | | tcctgggctgatctttgccaggagcgttatctgtgggcggaagagagttttgtcacgtttctacaaaaatttgacgcacagaggtt |
| | | gatccagtcggcagacaatgccaataggcaggtttcagtgatcctgtacggtccggcccaagtaggtaaaacctcattaatcctga |
| | | ccctgctgggtattcgtgatgactgcttcaccgagctcaatactttgctacgcggcgagcaggggctgggcacaatgtccacggct |
| | | cgcacctatcgctatcgcatggcgaaagatgacttctggtatttcagccatagggagtacggtgcaactcggtttagtgacaagga |
| | | ggcgaaagtcatttttgcagattttcgtcaggctgtggagcagggcgagcgtgaattcgatagtgtggatgttttcctgccgcgcc |
| | | gtttttttgatccgaagttacagagcagtgcccagttgctgatccgtgatttacctggaactcactcaaccaacgccaacgagcag |
| | | tattatgtcaacatgcttgccagccgatatcttgcttctgccgatgtggtactgctgaccggcaaggctgatgcgttggccttcct |
| | | taagccggaagagttagacaatgctctgctgaacgactggcactggcaacgccaccgctacaagattgtactgacccgtgcttatt |
| | | cagatgccacactccagcgttttatcaaacaaaaacggtttgataaaaaagcaatgcggatatttttgcttcaacagattaatacc |
| | | atggatctgggcttgcctgaaagcatcagtgaactgatttaccccgtggagtgcggtcattcttggctggcaatcaatgccaaaga |
| | | tgacgagtttgcccgccagtgccgtgatttgcggcgagatgtattgcaagatttactcgactctctgcaccaggcatcgaacccat |
| | | tatcacgcttacgttcgggatacgcgctgccacatatcattaaacagcagatagctgtcgaaaaagagctttacgagacggaaaac |
| | | gcattgctgcaaaaacagctctctcggctgggggaatatgttgatatgtacgagaaacgggtcagcagtaatagagataatcacct |
| | | gaggttacaagtaaagctgcaagcactattacaaaaacgtgaggacgcgttgagtacagattttcgtgaacattcgaatgcgtttc |
| | | aaataatttcgcaatcatctctcggttatcttaagtctcaaatttatgcatctcgtgaaacaaataccaaacgctggaacgatctg |
| | | ctggaaatctaccagcttccacttgaaagagtaccggagatgcccaatctagagcgggtcttaaaaagactaaacggctacttgtt |
| | | tgagacctattttcgagagaaaacacgtcagaatgatcagtatgagatagaagaggcaggctttaaagacgcaaactgcttaacgt |
| | | atattttccacgaacgaatcaaggttaagtttggtgccgaagagcgcgccttgaacaataagatagccaaaaacgagcgggcagcg |
| | | tgccgactggtgcgtatcgHgaacaattgtcgaaaaaaatggtgcacacgcagtcaagactcttccagatcaagcaggagttaggc |
| | | gtatcgttaactctrtattttcagagatataaagagagtaaaaacttttcgaaagtcattgtttcggcgaaaaatactcgagcgcg |
| | | tgaaatcgaatgcaacgctaaaaaaccgaatattacacgcagcgagcgtctcgcttgggtgctgatgtatagagcgttaaagaatg |
| | | attttgactacgtaaagtccttagatgaggagagcactaaagttgaataaaaatcttgctgtcgcggaagtgtccagcgatgagca |
| | | gttactggaccaactggtgcaggagctgtttttagagcatttgcgacgtgaactgggtgtgcagaagaagagtattgacgacagta |
| | | atgacaaactctttaatctcgaccgaaaatttgtcgctgaatttaaaaacgtgagcggattgcttgatacgatatccgacactctt |
| | | ggcgaacagactcgtgaactgaatgatgctaaagctgatgcccaaacacattatcgttctttgctgaatagtttggcacagaaccg |
| | | aacggacaccgctgctctgcaagatatactccagcaactaagtagtaagcgtcataaggaacaaggcgagcaactgcaacggatcc |
| | | aggaacagttgtttcatcagagcgctgaactccaagcgcaatactccgtgttgacagaacagaatgcagtgttaaaccagcagcag |
| | | gaggtccttcagaaacaacggttcactgctactctggccgaaatgcaagagcaaaacgtgacgctggcgtcacttacggaacagaa |
| | | taagtcgctgcatcgacagtttctcaccttagaagatgaacaacgtgcagattttcggacaaatagtcgctggggtaagcttgccg |
| | | ctggattctccatagcgaatacgcttatcctgataagcgtgaccgcactgtttatagttaagtactttctataaagaacccgcgtg |
| | | cacaactcttcttcatataaaatatcttttccaacagatattgcattgaggatttcttttattgctgtttatgaaatggctaaata |
| | | tcctccgacaaataagaacagtggcggatttttcatcctcgtctttttcagggag (SEQ ID NO: 54) |
| 58 | pLG060 | atcagggcaaggaccgttgcccatatgtgactggttttggtgtcggctatgtggccaggctgcgtgaaagctactgatcgcttttt |
| | | aatctaagtggtggatttatatgatcaatcattattgataaactcatgaagaaacctaatttatttaataaaattaaaaagtatac |
| | | gattagatattgcgggtgtagatatgactcaccacattaaaggtcaaggcagacatcaggtgacgttgctctctgacgtgcttgat |
| | | gattttgtcacagaagataaaaacacgttgaagagagaaaaatgaataccgcagaagactttaaccgcctctatgccgacgtttca |
| | | cgcaatattcagcagacgctgactgatatcgctgcacttcatgttgaaaatgaagagggaaagcagcagctacaatcgatggtcac |
| | | tcagttgcaatccctgcaggatggctttaaccagaagctcacgtggctgcaaaagcatgccgaatgggacaaatttaccctggcat |
| | | tctttggcgaaaccaacgccggtaagagtacgataatcgaatcgctgcgcatcttgtttgacgaagaatcccgccgccagctgctg |
| | | caaaaaaaccacaacgacctggaaaaagccgagctggaattacaggaaatctcggaacgactgcgcagcgacttagggcggatcta |
| | | tagcgatgtagtggataaaatcaccgatatcagtttttccgctctgcgtctgatgcaaattctcgacaatgaaagcgccctgcgtc |
| | | acaaacgggaagaggaagagagcaaggaacgcctgctggttgaaaagacggaaagccagtcgcgattgcaaattctgcaaaaacac |
| | | accagcgccaaaacacgattaaccctgtgcattgccgccgtcatctcttttgtcgcaggcgcaggcgcgagcgccgccgtggtgtt |
| | | caatatgatggcggggcaataggatgagtaacgcactagatcttcaggctagtaccacgtcagtacgttcgcaacgaaagtcctca |
| | | ttgaatattcaggagctcctgaataaaacgctgcctcacctggttcagaccataatcaggaatgagagattaaaaaacaccctact |
| | | tcaggttgatggtctcattatcggtaccggcgaggcggattttaccaaagggaatacccgctacgccttacatattgacgataaga |
| | | ccttccatctgctggacgtacccggcattgaaggcaatgagtcacgctatatcagccaggtgaaggaggctatcgccgaagcgcat |
| | | atggtagtgtacgttaacggtaccaacaaaaagcctgaaaccgccaccgccgaaaagatcaaatcatacctcgaatacggtacgca |
| | | ggtttatccgctggttaacgtgcgtggatatgccgacgcctatgaattcgaagaagatcgccacgatctgatgcagcaaggaggcg |
| | | caggagaagcgctgaagcaaaccgtcggggtactgcaaccggtgctgggctccgatgtgctgcttcccggtaactgcgttcagggg |
| | | ctgctggccttctgcgggctagcctatgacgatgcgacgcaaagcaccactatccacccctcgcgcgcgcacaacctcgccacgca |
| | | acagaaacgctatttccagcacttttcttctcgtcgggagatgcaggaatttagccagattgacgccattgcccgcgtcattcgcg |
| | | gtaaagtcgccacttttcgcgaagatattgttgaaagcaacaaaggcaaagtgcgagagtcactgggtcagtatctacaggtacta |
| | | aacacgcaactcaccaatcatcgcgcatttctaaagaaaacagagccggaatttgacaaatgctgcgtcgcctttgctaacgccat |
| | | tgcagcctttgaacgccgaatcatcaataaccgccgtaaccgctggaacgactttttcaatgatctgatggaaaaaagcgacgaca |
| | | ttgttgaagacgattttggtgataaagaggcgattgcccagcgtattagccagcagtttaaatcgcgtcgcgtcgaggtgaaaaaa |
| | | ttaatgctccaggacactgaggagggcgttaaggccttacaggagcagatgattcaagcggtggctcgtttgttgcaagatattaa |
| | | gcacattgagttccagcagcatgtcgatttcgcccacggcggtgaattcgaatttggtcgcgagatcgcgctgggttatgaccttg |
| | | ggttaagggatttcggctcaatggcctttaaaatcggcagctacgccttaagcggcgccacagtcggtagcgccttcccggtgatc |
| | | ggtacggccattggtgccgtagcaggcgctttagtcggcgtcgtcatgaccgttgtcggtttctttaccagcaaagcgtcgaaagt |
| | | tcgcaaagcgcaggggaaagtgcgcgacaagctagaaagcgccagagataaagcgctggacggtattgatgatgaggtccgtaacc |
| | | tggttgcggctatcgagaatgaactgaaaagcagcctgctgcaaaaagtgaatgccatgcatacggcattgcagcagccgatcgcc |
| | | attttcgaacagcaaatcacgcaagtcacccatttaaaaaatcaactcgagaacatgccttatggaacaattcaaacagttcagta |
| | | ttgagaagcaggctgccattaactcgctgctacagctgcgcggcatgctggaaacgctgggcgaaatggagatcgatgtcaacgac |
| | | gatctgcaaaaaatcgcgtcggccatcacagccgttgagtccgacgtgttgcgcattgccctgttgggggctttttcggacggtaa |
| | | aaccagcgttatcgccgcctggctcggcaaaatcatggaagatatgaatatctcgatggacgaatcttctgaccgtctgagcatct |
| | | ataagccggaaggattacccggagaatgtgagatcgtagataccccggggctgtttggtgataaagaacgagaaatagacggcaaa |
| | | caggtgatgtatgaagatctcaccaaacgttttatttccgaagcgcatctgcttttttacgttgtcgatgccactaatccgcttaa |
| | | agagagtcacagcgccatcgcaaaatgggtgctacgcgatctgaataagctgtcatcgaccatcttcatcatcaacaaaatggatg |
| | | aagtgactgatttaaccgatcaggcgctgtttgcagaacaggcggccatcaaaaaagagaacctaaagggcaagctacagcgcgcg |
| | | gcaaacctgaatgcgctagagcttgaacagcttaatattgtttgcattgcttcaaatccaaacggtcgtggccttcccttctggtt |
| | | caacaaacctgaacattacgaaagccgctcacgcatcaacgatctcaaaacagttgccgctgagattctgaaaaccaatgttcccg |
| | | aagtgctgctggcgaaaactggcatggatgtggtgaaagatatcgtcacccagcgtatcaccagcgcccagctgcatctcagcaaa |
| | | ctcagcacgttcgttgcgaaaaatgatgaagatacttcgcgttttacatgcgatatccagcaaagccgtaacgaggtcaaacgtct |
| | | ggctggcgaaatgtttgaagaacttagtttgctggaaaagcagctgatgagccagctacgcccgttggagctggatggcattcgcc |
| | | cctttatggacgacgaactgggctataacgatgagggcgtcggctttaaattacacctgcgtattaagcatattgtggatcgcttt |
| | | tttgcgcaatcctccgccgtcacgcagcgactgtcggacgatattactcgtcagcttaattccagcgagagcttcttaagcggagt |
| | | tggcgaaggggcatttaaatccctcggcggcgtgtttaaagggatttccaaaattagcccggagacgattaaaaccacgatttttg |
| | | ctgcacgcgataccattgggcaattaacgggctatgtctacacctttaaaccgtgggaagcgaccaaactggctggcggcatcgct |
| | | aagtgggctggtccggccggggccgcatttaccatcggctctgatctatgggatgcctataaagcgcatgaacgtgagcgagagct |
| | | ggaagaggcgaaaaatgagttgacccggatgatcaaagatccgttcagcgatatctatagcgtcttgagttcagatgaaaagacgt |
| | | tcgctttctttgccccccagattcaagagatggaaaaagtcatttgcgatctgacagaaaaaagcgacaccattcggaagagccag |
| | | caaaagctaagcatactccagcagaagctcgagcagtttaaccgttcgagcgagcagcaagtgtcctgatacacaaacggcagccc |
| | | gcaggccacgtttagttataaatcaaactaaacgtggccaggtgacatgccccccgttgattaacacacgttatcgtcgggtggaa |
| | | aggacaacctcctacgtccgcttcacagcggacactcaggtttaacagtccagtacgtttagcttacggataaatcattttatgat |
| | | gatgtggagaatgggggat (SEQ ID NO: 55) |
| 59 | pLG061 | tattttgcgtagctagaacgcaatcaaatctagcagtccgctttgttcggagttcggacattatgagttggcaagtaaagtagctt |
| | | gctaggaagccggatttgcacggtcggtataataagatgtaaccccttgccttcatttactcgaatgaacgtgcacattggatagg |
| | | aggaaaaggaatgcaattcattaccaacggccctgatattcctgatgagcttttgcaggcgcacgaggaagggcgcgttgtgttct |
| | | tctgtggagcaggcatttcctaccctgctggtttacctggtttcaaagggttggtagaactaatttaccagaggaacggaacaaca |
| | | ctttcagaaattgagcgtgaggttttcgagcgtgggcaatttgacggcacattagatttgctggaacggcgcttaccagggcagcg |
| | | tatagccgtccgacgcgcgttggaaaaagcccttaagccaaagctccgtcgtaggggcgctattgatactcaggcggcgctgttac |
| | | gtttagcccgtagccgcgagggtgcccttcgattggtcactaccaactttgaccgtctctttcatgtggcagctaaacgtacaggc |
| | | caggcttttcaggcctatgtagcgccgatgctgccaattccaaaaaacagccgctgggatggacttgtatacctgcatgggctgtt |
| | | accggaaaaggcggatgatactgccctgaatcgtctggttgttaccagcggtgactttggcttggcttatctcactgagcgttggg |
| | | cagctcgctttgtgagtgagttatttcgtaactatgtggtctgcttcgttggctacagcatcaacgacccggtactgcgctacatg |
| | | atggatgcgcttgcagcagatcggaggctcggtgaagtcacaccacaagtatgggcactgggggagtgtgagccggggcaggagca |
| | | ccggaaagccatcgagtgggaggccaaaggggtcactcctatcctttacaccgtaccggcgggctccactgatcattcagtgctgc |
| | | atcaaacgttgcacgcttgggcagatacttatcgagatggtatacagggcaaaaaggctatagtcgtcaaacatgctctggcccgc |
| | | ccgcaggacagcactcgtcaggacgatttcgttggtcggatgttgtgggccttgtcagataaatcaggtttaccagcaaaacgctt |
| | | tgcggaactcaatcctgcaccgccgctggattggttattgaaagctttctcggacgaacgatttaaatacagcgatctgccacgct |
| | | tttgtgtatctccgcatgtcgaaattgacccgaaactccgattcagtctggttcagcgtcctgcgccctatgagctggccccgcag |
| | | atgtcgctggtttctggatgtgtcagtgctagcaaatgggatgacgtaatgtcccatatagcccgttggctagttcgttatctggg |
| | | cgaccctaggttgatcatatggattgctgaacgcggcggacaaatacacgaccgttggatgtttctgattgagagcgaactagatc |
| | | gcttagcagcactgatgcgggagcgtaagacttctgagttagatgaaattctcttgcattcccccctggctattcctggtccacct |
| | | atgtctactttatggcggcttctgcttagtggtcgtgtgaaatcgccattgcagaacctggatttgtatcgttggcaaaaccgctt |
| | | aaagaatgaaggcttgacgactacattgcgcttggagttacgcgggttgctttctcccaaggttatgttgaggcggccgtttcgct |
| | | atagtgaagacgattcgagcagcactgatgaacccttgcgaatcaagcaattggtggattgggagctggtgctgactgctgattac |
| | | gtacgttcaaccctgttcgaccttgctgacgagtcatggaaatcgtccttgccatacctgttggaagattttcagcagttgttgcg |
| | | tgatgcactggacttgttgcgggagttgggagagtccgacgatcgtcacgaccgctcgcattgggatttgccgtccatcactccgc |
| | | actggcagaaccgggggttccgcgattgggtgagcctgattgaattacttcgggattcatggttagccgttcgagccaaagacagc |
| | | gatcaggcctcgcgcattgctcagaattggtttgagttgccatatcccaccttcaaacgtctggcactgtttgccgcaagccaaga |
| | | caactgcataccacctgagcggtgggttaattggttgttagaggacggttcatggtggttgtgggccacggatactcggcgagagg |
| | | tattcagactgtttgttttgcagggacgacatctgacaggaattgcacaagagcgtctggaaactgctatcttggcagggcctccg |
| | | cgcgagatgtacgaggataatttggaagcagacaggtggcattatttggtggctcattccgtctggttgtgtctagcgaagctcag |
| | | gggagcgggccttgttttgggagagtctgcggctacacgtttgacggaaatatccacagcatacccaaaatggcaactggcaacca |
| | | acgagcgtgatgaattctctcactggatgagcggaaccggtgatccaggcttcgaggagagtatagatgtcgacattgcgccccgt |
| | | aagtggcaggaattagtgcaatggctcgcaaagcctatgccagaaagactgcctttctatgaggacacttggagtgatgtttgccg |
| | | tacgcgcttttttcacagtctgtatgcgttacgtaaactatcacaagatgatgtgtggcctgttggtcggtggcgtgaagctctgc |
| | | agacttgggctgaaccagggatgattttgcgttcgtggcggtacgccgcaccgttggtgcttgacatgcctgacgcagtacttcag |
| | | gagatttcccacgctgtcacttggtggatggaggaggcttcgaagaccatcctctgccacgaggagattctactggccctttgtcg |
| | | tcgggttctgatgatagaaacaagcccagagtctagcaccattcgaaacggaattgagacctatgatcctgtttctacggcgatca |
| | | atcatcccattgggcatgtcacgcaatcactgatcaccctatggttcaaacagaacccgaatgacaatgatttgcttcctgttgaa |
| | | ttgaaaacacttttcaccaaattgtgtaatgtacagatagagctattccgccatggtcgggtgttgctggggtcgcggctgatcgc |
| | | attttttcgcgtagatcgaccttggaccgaacagtatctattgcccttgtttgcttggagtaatcccgtcgaagcaaaagctgtgt |
| | | gggaaggcttcctctggtcgccacgcctgtatgaaccgttgctgatagctttcaagtcagattttttggagagcgccaatcactat |
| | | tctgatcttggcgagcaccggcagcaattcgctattttcctgacttatgcagctctgggccctaccgagggatataccgtggagga |
| | | gttccgaacggcaattagtgctcttccacaagaaggtctggaggtagccgcgcaggcgttataccaggcacttgaaggtgcgggcg |
| | | atcagcgcgaggagtattggaaaaatcgtgtccagccattttggcaacaggtttggccaaagtcccgcaacttggccaccccacgc |
| | | atatccgaatcgttgactcgtatggtgattgctgcccgaggtgaatttccggcggctttggcagtggtgcaggactggctgcaacc |
| | | gctcgaacaccttagctacgacgttcgccttttgctagaatcagatatttgcagccgatatcctgcggacgctctatccctgctga |
| | | atgccgtgattgccgaacaacactgggggcctcgagagttggggcaatgcttgcttcaaattgttcaagctgctccacaactggag |
| | | caagatgttcgttatcagcgattaaatgaatattctcgaaggcgcagcgtgtgaaagtgacaggcgttggacagtgcgaactgtgg |
| | | agcctaacaaggtaaagacactctaactgataatgctgcgccgctcgtgcaatgcaatacagtttttatctagcggtgaattatgg |
| | | tgttaaaagttagcccctgacacagggtgggtagttggctctgtgtcattgatgggtattagttctgatatgagctaataccca |
| | | (SEQ ID NO: 56) |
| 60 | pLG062 | gtaagacaagggttgagcaggctactaatcgttacacaggctaacaaaggcatattaagacgatttgtagcgctgtaaccttgaaa |
| | | attatgtacaagcgccccgcattacgtcgttttaaaggccatcggattcaggcccgacgcggcttcacgcgattataaccgtgaaa |
| | | aatcccccccgcatagaacctgaattatccccgccgccgcgcagaactgacagcgcttcagaaccgttaaccctctcagaaatccc |
| | | gcttttttactgtaaaaaaccatgcataaggtgcatggttttgcatgcgtttcaccgacactgaatcccccgccagcgccagcagt |
| | | agcgtgccctgaggccgttaatgcacccgtattaaaagcgccctgttaagcgagcaggcggggcggggcgagcattgcgcgtcggt |
| | | gttaccaattctatatggacattgagcaattcaaatataataaaggttgggtatatttcgtcctcaacgatgtcaaaaactgcaaa |
| | | agcgtattataattcagatcattttcagaccacctattttaatcatgcatgcaaaatggaatatgtgatgacaaataaaaacaaaa |
| | | tcaaaccattattaaataatatatccgctcgcctttgggatggtcgtgcagctatattgataggagctgggttcagtcggaatgca |
| | | aagccattaacaagcaaggcaagaaagtttccaatgtggaacgacttaggtgacattttttatgaaagtgtttactgcaaaaaaaa |
| | | cgacaatagatattcaaatgtattgaagctaggagatgaagttcaggctgcatttggtagagcgacacttgataaattaatcatgg |
| | | atcatgttccagataaagaatatgaaccatccaaattacatgtttcccttctttccttgccgtggattgatgtttttacgactaat |
| | | tatgatacattacttgagcgagcaagtgttaatgtcgactccagaaaatatgacattgtccttaataaaaatgatttaatgaatgc |
| | | tgaaagaccaagaattataaaactgcatggtagcttcccatcagaaaggcccttcatagttacggaggaagattacagaaagtatc |
| | | ctttagaaaattctccttttgtgaataccgttcaacaatcattgattgagaatactctatgtctgataggattttcgggtgacgat |
| | | cctaacttcttaaattggattggttggataagagataatcttggcacagaaaattcacccaaaatatacttgatcggtcttttttc |
| | | atttaatgaagcacaacgtaagcttttagaaaaaagaaatatttccattgttgatttaagttttctaggtgattttggcaaggatc |
| | | attatctagcacaccaacgctttatccaattcttatacgaatcaaaaaatcgagacaacctaatagagtggccaatagaaaccaat |
| | | tatgacagaattgtttttaatgatggcattgaattaaaaactgagaaaattaaaaagtgtatcttagaatgggctcagtcaagaca |
| | | atcatacccgaactggcttattttgccggaatcaaacagaagtaatttatggcaaaacactatagattggttatctgttgctaatt |
| | | atgatgtcgcttgggatggttctgatgatcttgattttggatatgaaattacatggcgactaaataaagctttgctaccaattttc |
| | | aatgatacatcagaattcttatttaagttgattgaaaaatatgagatcaattacgtttcggggataaataataaaatcattgactt |
| | | tgatgaaaaatactctcatataaccctcagtttaatgagattctgtcgacaagaaaaccttattgataaatggaagaatctaaacg |
| | | atttattaattcaaaatcttgatcgattaacaccagaggtaaaatctgattattattatgaaaatatattattttcatacttcaat |
| | | ttaaacttcgatgaagccagaaacaaactctccaactgggaaacgaataaactcctcccccatcatgaaataaaaagagcaggatt |
| | | acttgccgaatttggaatgcttgatgaagcaatcaatcttcttgaagaaactttatctacgattcgaagaaacagtttgctttcat |
| | | ctagaaacattgactattccagtgaatctcaagaagcatatggaatctatattttgcgaatgtttaaacggagtttgcgtttagat |
| | | agcaaagatgacgattattcatctgagtataactcgcggttggctacattatcacaatatcgcagcgatcctgaaaacgaaataaa |
| | | atacctagaaattaaactagagtcactaccaggtaccttcaagaataccaatgacacggatttcgatcttaacaaaagaacggtga |
| | | ccacttatttaggaggaagcccaacagaagtgaggtcattagatgcttttagtttctttctactggcagaggaacttggcctccct |
| | | ttccacataccaggaatgaacatttttagtggaatagttgagaatgcagctcgacatatttatcaatactctccagagtgggctat |
| | | tttttcaatatttagaacatttaacaaggataaggccaagagtctattcaatcgaaatagaatttcgtctcttgagcgaaaaaagg |
| | | ttgaagatttatttgatggatactacaaaaaatatgagcaaattatcacaaaaaaaatagaagatagattaaacgataaacttgag |
| | | atagaaatttctacgctatcaatcattcctgaaattctttcccggctagttacaaaagtatcatttaataaaaagaaagacattat |
| | | tcaccttttgcttaaactgtttaactcggataattttcatcaatacatggagactaaagatctattaaagcgcactatttccaatt |
| | | tgagcgacttacaaaagatctcactaatagatattttcattgatttcccctccgcgcctcccaatacccaattacatatgggtcaa |
| | | agatacaacttccttactccatttgaatgtctattaggggttacaataacccccccaaaagaaaactctaaaaaaatcgcatctgc |
| | | aaaattaaaaaaagatataaacgatttaaaaagtgataatttagacttgaggaaagctgtatcacaaaagctcataacattatata |
| | | acctagaaatgcttaacaaatctgacacgactaaacttataaaaaacctttggtcaaagcgtgataactttggattcccaataggc |
| | | agtggttactataaatttttctttataaacaaccttaacccagataatgaaaatatagccgacaaattcatttctataattaaaac |
| | | atacaaatttcctgtgcaagaaggaaaaagagttagtattacaggtgggttagatgagtattgtactgaactcaatggagcgctac |
| | | accatataagtcttccagagaaaaccctatctgaaataatttcaaaaatacatgactggtatgtcaaggatcgggcctggcttgaa |
| | | aaaagagatgatttagccaaggagttcactcttagattcagaaatatcacaaatatcataacgacaattttagaacaccataagga |
| | | caaattacatgctgaatctataaatgaaatatcaagcctactagataaaatgaaagaagacaagatacctgtaaactcagcagtaa |
| | | caatgctttgtctgaaaaataaaagcacttacctcgagagaataaaagatatagagaatggactatatagctttaataaagatgat |
| | | gttattgaagctatcaactcaacttatgtctttattagaaacaatgaatttccactaaccatcattcaagctatcagcgataaaat |
| | | cgcatgggatagaaaccctcgccttcctgattgctacaatttaattgcatatataattaactcgtgtgaatttactcttccagatt |
| | | atttaatagagaaaatccttcgagggctggcatatcaaataaacattgatgatagagattttgttgataacaatgaatatttgaat |
| | | caccttgagaaaaaacttagtgcaacaaagctggctgcttctatgtttagaaaaaatgaaacactaggtattgaccaaccttctat |
| | | cattcaagagtggaaaaacatgtgcaactctagaaatgagttcgatgaaattaggaatgaatggaacaacaatatataaataaagg |
| | | aagaacacccaatttatattgggtgttctgttcacgaaacccttttaccataatcgaatggcaatataaattgagattgaaattta |
| | | ttctcatctaattaatcagcccaccattg (SEQ ID NO: 57) |
| 61 | pLG063 | actagctaagcaataagggcgatcggctctcccatagatcgaggccgaatgatgttagcaatgttcactcttggctggaatctgcc |
| | | agaaatcgaggtcatatggtctgctttgagtgaggagcgcaaatggataaagccctcatgagttctttttcaatgacctaactttt |
| | | gagaggcactgggttagatcatgtttcatgtttgcaatacaatatatatttaaacttaggtttataacttaaatgttagttcctga |
| | | tctaaaccagattattaatcactcctagagtgaaatgagttaagccaagagttgataaaattaacagttttttttacaatatctgg |
| | | atgtttgctagcgaacaggcatctaaaataactatgctgagctaaacttacaattcaaattgtaccgaggataaaatgcaagtaca |
| | | acatcatactgaaccaaacttgaagaatgagattgtggctttatttaaggcttctcaattgatacctttttttggcagtggattta |
| | | ctagagatattagagcaaaaaatggtaaagttcctgatgctattaaatttacggagttgattaggaatatagcggcagaaaaagaa |
| | | gggttaacacaaacagaaatagatgaaattctaagaatcagccagcttaaaaaagcgtttggacttctaaatatggaggaatatat |
| | | acccaaacgaaaatcgaaggcattattaggtaacattttttcagagtgtaaactctctgatcacgaaaagacaaaaataataaatt |
| | | tagattggcctcatattttcacgtttaatattgacgatgctatagaaaacgttaataggaaatacaaaattctgcatccaaatcga |
| | | gcagttcagagagaatttatatctgctaataagtgtctattcaaaattcatggcgatattactgaatttattaaatacgaagatca |
| | | aaatctgatatttacttggcgtgaatatgcacacagtatagaagaaaataaatccatgctatcctttttatctgaggaagccaaaa |
| | | actcagctttccttttcataggttgcagtcttgatggagagcttgatttaatgcatttatcaagaagcacaccatttaagaaatca |
| | | atttatttgaagaaaggatatttaaatttagaagaaaaaatagctctttcggagtacggcatcgaaaaagtaattacctttgacac |
| | | ttacgatcagatatatcaatggttaaataacacacttcagaatgttgagcgaaaatcccccacaagaagtttcgaactcgatgact |
| | | ccaagttaatgaaagaagaggctataaatttattcgctaatggaggccctgtaactaaaatagtggataataaaagaatcctgcga |
| | | aattctataactttttctcaacgagatgtctgtgatgatgcaattaaagcactacgtaatcatgactatatcctaattacaggtcg |
| | | acgtttcagcggaaaatctgtacttttatttcaaattattgaggcaaaaaaagaatataatgcctcttattactcttcgactgaca |
| | | cattcgatccttccattaaaaactcattgataaaattcgagaatcatatattcgttttcgactctaatttctttaatgcacaaagc |
| | | attgatgaaattttaaccacaagggtgcatcctagtaacaaagttgttttatgctcgagttttggtgacgcagagttatatagatt |
| | | caagttaaaggataaaaagatattacataccgaaattcagattaaaaataacttgattaatgaagaaggtaactatctcaatgata |
| | | agctttcttttgaggggctaccactttataaatcttcagaaacgttgttgaattttgcttatcgatactatagcgagtataaaaat |
| | | ttagactaagtggttctaatttatttaataagcaatttgatgaagattcaatgtttgttttgattttaattgcagcttttaataaa |
| | | gccacatatggtcatatcaacagtcacaataaatattttgatattcagaattttatttcgcaaaatgatagattatttgaattgga |
| | | gtcaactaacacagatccaagtggagttataatctgcaattcaccatcctggcttttaagagttatcagtgagtatattgataaga |
| | | atcctgcatcttataaaacagtatctgatttaataatatctcttgcgtcaaaaggatttcttgcagcatcaaggaaccttataagc |
| | | tttgataaactaaatgaacttgggaatggaaaaaatgtccataaatttatcaggggtatatataaggaaattgcacatacctatcg |
| | | tgaagatatgcactactggttacaaagggctaagtcagaattaatatcggcacacacaattgatgacctcgtcgaaggaatgagtt |
| | | atgcaagcaaagtaagactcgatagtgccgagtttaaaaatcaaacttattacagtgccacattagtattagcgcagttgtctgca |
| | | agggctctatctataaataatgataaaatatatgcgctgagcttctttgaaagtagcctagaatccatccggaattataataataa |
| | | ctcaaggcacataaacaaaatgatggataaaaatgatggtggctttagatatgcaatacaatatcttaaggataatccattaatag |
| | | aactccttcctcgtaaggacgaagttaatgaattaattaacttctatgagagtcgtaagaaataatcatccttaaattaataaatg |
| | | gcaagtaactcattcccttgtcatttattaaactcttaagagccttatcccgaaaagtattaatctgagctaataagattgttttt |
| | | cagctatgtcattattttattgccaatatatttacacttaagcattgacaggtagcggatagttatttttggcttgtaaataagcc |
| | | ttttaataatagaactgtaagacaatcgctctgattttttgaaatttatctcaatgttaaattcttccgcttttggcacaaacggg |
| | | ctagagcagacagatttaatgagataagggtatagatgaattctccatacccttgaacgattacttcccagttgatttgcttggtt |
| | | tcagtcctggggtattaccgggtgtatccttattatcacgtctgcgttgatcgggttttcctgttgattttgcaattggttttgga |
| | | ccaggtttaagccccataatcgtactccttagccatgtcagaggttattcctcagtgtggatataaggggagcggtaagaattatc |
| | | aagcttggatgggcggtgaaaaatgactacttgactattatgtgagcaatgtcagcttttgacatttagaggccagcccattactg |
| | | aagtaagccaaaaatgagtcgcgatgagccctcaacaatgagggccacctcggagattg (SEQ ID NO: 58) |
| 62 | pLG064 | gacagcttccagggtatcgtggacgcgtcatgcaaagagatggggatgagggattttaatattctaccccttgtaccccatgccag |
| | | tggtcgacctcataaatcattgattttaaaagcctcacttagggcgctcgctgccaccgatgccccacgatgcctgacgatcttca |
| | | acgactccccgcaaaagtccctatgcctcggaaaagccgccaaccccaacaacaccacctaacaacaagaaacaggacctcgtgcc |
| | | gagcttgttagcgcgactgactagccgtccgaaagcaaaaacaccgcgagccaaacaaggcaatttcttgcccccctaaggaacca |
| | | cctgaggattgaacaccagcgcagcttactgtatataaaaacagttaaagtcctgttctcaggctgcatctggatcacacagccgc |
| | | cgttactcggaaacacggcggattagcgcgcacgctcaggccctccagccctaacggaatatgaatatccagaaaatcaaacacat |
| | | atcagcctcacgcagcgcatagcgccctgccagaacacagcaggaagtcattgcgtttgcgttcctggcaatccatcattcacggt |
| | | tagggcccctataagacctgcagaagcagcgcgccatgggcagacccggcaaaagcccccaaacgggtgtggagaagctttatgga |
| | | gaaggaaatcccccacgaaggattcacaggctctagtaaagagccgctccagacgctccttccctttaatatcgatgaacccgggc |
| | | aggagcccatgaaaatccaagatttccccccactccccgcctccgaacagccgttgatgtttgcagacttgtttgcaggctgtggt |
| | | ggcctgtccctcggtctctcactttcaggcatgaacggcgtgtttgccatcgaacgcgacaagatggctttctcgaccctatccgc |
| | | caacttgcttgaagggcggaaggtgccggctccgcagttttcatggccctcatggctaggcaagaaagcctgggcaatcgacgagg |
| | | ttctcgaaaagcacccgattgagctcagtcagctaaagggcaagatccatgtcttggcaggaggaccaccctgccaaggtttcagc |
| | | tttgcaggaaaaaggaatgaatccgacccccgcaacaagctgttcgagaagtacgtcgaaatggtccaggccatccgaccatcggc |
| | | ccttgtcctggaaaatgtccctggaatgaaggtggcgcacgccacaaagaaatggaagcaactaggtatctcgatcaagccccagt |
| | | cctactacgacaagctggtagagagtctggacaggatcggataccacgtccagggcaatatcgtcgactcctctcgcttcggggta |
| | | cctcagaagcgcccacgcctgatagtaattgggctcagaaaggacctggcccagcacctcgaaggcggggtagcccgagcctttgt |
| | | gctgctagaggaagcccggctcaagcagctacaagagttcgaccttcccgaggccatccatgccgaggatgccatctcggatatgg |
| | | agataggtcacgcgggaacgaggccctgcaatgaccctgactcccctaggaaattcgaagagattgcctataccggccctcgaacg |
| | | gcgttccaaaggctcatgcatcgaggctgtgatggcaccatcgatagcttgcgcctcgccaggcacaagccagagataaaggctag |
| | | gttccaggcgatcatcgacgaccccaactgtgccaagggcgtacggatgaacgccgagatacgccaagcatatggactcaagaaac |
| | | accgcatctacccaatgcaggccagcgctccggctcccactatcacgacactgccggacgatgtcctccactacaaggagcccagg |
| | | atactgaccgttcgggagtctgctcgactgcagtcattcccggactggttccagttccgaggaaaattcaccactggcggtagcca |
| | | acggacgaaggagtgcccgcgctacacccaggtgggcaacgcggtaccaccttatttggcacgcgccgtcggcttggctatcaagg |
| | | caatgttggatgaggccgtgatgctcgccggccaacaggcagagcgagaacaagaagagaaaatgatagccatcgcttgaacacat |
| | | aggagtcgaggggaatggatagctcccaactggaaggggcgcaatacccggccgcgcttgtcgactgggccggccatcactcagga |
| | | ggcgtaaaaaggctgctggataaaaatagcggccagcctaacaagcagctgctacggacgaaccttttgtcccgtctccaggcctg |
| | | ggctaacaggcttcccaccgagacctcagctgtccccaggattgtcctgcttgtgggtggtcccgggaatgggaagacagaggcaa |
| | | tcgagtgcaccatccgctggctcgacgagagcctcggctgcgatggccggttggtcgaggaactctcgaaagccttccatccctca |
| | | accggctccgcagtcccccggctggccagggtagatgccggcagccttgccaagctagatagcagactgagcctcgacattgtcca |
| | | ggatgcctctgctaccgccgggcatgagggaagcaccgcccccgtccttcttatagaggagcttgccaggctactggatggacctc |
| | | cgacccaagcctatctctgctgtgtcaatcgtggtgtcctcgatgatgccctgatccacgcaatagacaacaatctggaacaagca |
| | | cgaactcttctcgaggcggttacccgggctgtaagcctggcgtacaacgcgccttcatgctggcccctcgagggtttcccatccat |
| | | tgcagtctggccgatggatgccgagtcgctcttggtaaagccggacgacgagcccgtagcccctgccgagatactcctaggccaag |
| | | ccactgctcccgatatgtggccagcgaaaggggaatgcccagcaggcgacaaatgccctttctgcgccagccaggccatcctcgcg |
| | | cgggatgagaacagggcatccttgctgaagatattgcgctggtatgagctcgccagtggcaagcgttggagtttccgggacctgtt |
| | | ctccctcacctcgtacttgctagcaggccaccatcctgtagtccacgatccctcagggactccccaccagtccactccttgccaat |
| | | gggctgcgaaccttgtcgacctcgaccaaaaggccctaacggcgaaaaggcatggcaagcagtcgctaactgccattttccacctg |
| | | tcgacttcgagctaccaacatgcgctcttccatcgctgggacaaggacgcagctacctcgctccgccgcgacctcaaggatcttgg |
| | | cctcgagaaggaactcgagatggaggaagggcgaaccctaatggggcttgtctatttcctttcggagcgcaaaagccactatctcc |
| | | cagcgaccatcgcccctctgctggaggggctggtcgaaacgctagatccagccttcgcaagcccagacggagaagttgcagtcagc |
| | | agtcgaaacacaatagtcctcggcgacttggatatgcgtttcagtcggtccctggccggaggtattgaattcgttcgtaagtacca |
| | | ggtgctatcgccaaacgagctcgatttactccggcgcctatccgcatcagacgccatgctttcgttaccgagcatacggcgcaaga |
| | | ggccggtggccgccagccgagtccagcacgtcctccgtgatttcgcatgtcgcctagtacgcagaagcatatgcacccggacggcc |
| | | atcgtggcggacgctcccattctcgaggcattccagcaggtcgtcgaggacagcgacaagcaccatcacctcttcaaggtggtaag |
| | | gcaagtaaaggaattgctgaacactgggaaggagttcgaggtgtcactaaccactacctttggccaaccactcccccctcgacaac |
| | | gccaggcaacgctggtcgtcccgcagagcccggtccggatgtccccccagaacaacaagggacgccctcacccaccgatttgctat |
| | | ctccatgtcggccaagggcaatcagtccagccagtcccactgacctacgaccttttcaaagccgtgaaggaactggaaagagggct |
| | | ctcacctgcatcccttccacgcacagtcgttgcactgctggacacgactaaggcccggctttccggcccgattgtccgcgaccatg |
| | | aactactcgatgatgcccggatccgcatcggcgcagatggcacggtggtcggccgctcgtggaatggttttgctgaaagccgggag |
| | | gacgacgtatgagccttgcggatttcaagcagaccccgtggagcaaatcacatccgaactaccagaagtcggccctggcaatcagc |
| | | cctgcccctgagtatgcgagctcggaagtcctgcttgcctcgctctaccgaaccataggcttcgcaacagccagcgagggcggcgt |
| | | gccgcaggccgggcgagatctagacaagcgtatccagaaactccgcgagaaacgccaatccccaccaacaggagcggtagtcggtg |
| | | tagaggcttggaatactgtgcttcacgggatcctggagagcccgaagcttcccaaccagtcgtccaagcgtttcctccaggtaacg |
| | | cccatcgtacccggggccgcactcttctccgggtctgcccgtctgagcagcaactcgtggcccgcaggcagcttgattcgccgcat |
| | | ggtctgcctgggatcgatggatggggagacggcgcaacgactttggcaacgcctcttcgctgcattgaacgtggacgacgaggacg |
| | | atgtcttcgcacgctggcttgaccaagagacatcggcgtggaacccgggagcaagcaactgggcactctcgccaatacccgcggac |
| | | gagatggtcacgttggagacggcagatttcctggggatcccctttctccccgcccggcgatttaccaaggacctacaggccatcat |
| | | gcaggccaagggttcaatgacccgccggcagtggactagccttctcgaggcattgcttcgcctggcagccgcatcccacgtgacgt |
| | | ggctgtgcgacgtccacgccaggacttggagctgcctgtgggccgcactaacggatggcattgctccttccagtgaactggaagca |
| | | agacgggcgctgttcccggaagccccgcagtacatgacgtacgggggaaaagccctccaaggcatcaaggacaaggtgtctagcta |
| | | cctaaatgcccggctgggaatcaatgccctcctctggtctctggcgcagataggagctccctattctggcaacctctcctcgagcg |
| | | ccggaattgctgcactttgccagcatattcgtcagcacaaggccgagcttactcgcctaggcacgcttgagacgattgccgatgtg |
| | | cgcgagcaagaagcccgtgcgcttctttgcaagaaaggcatcggctctaacctgctggagtttgcgcggcacgtccttgggcaacg |
| | | ccaggctgcagtcccattgctgagggggtacgaccagggatacatcctgaagaagaaaggcagcagcccgtccagcccatgggttg |
| | | tctccctcggccccgtcgccgtgcttgccttggtccactgcgcccttgcaggaatgggcggtccccgctcggtccaccggcttgga |
| | | cagcacctagaggcttatggcatggccgtggacaagcatgacattggcaggaacgacctgggccaccagttgcgaatgctcggcct |
| | | agtgctagatagccccgatgccgaaagtggcatgctgctactccccccgttccccataaaccaagccagccagggcccggaacatg |
| | | aatagacttgcacactggcttgccgccactgtccacgagaaagtcaggggctcgacacaagggttcggaggtaccagcctagaata |
| | | tcggcttatcttccgcggcccacccctcgagctactcgaaccggcctacgacgagctggcccgcaacggagggatccaggtgccaa |
| | | gcggggcagacggaggactggtgaccctgccggtactgctccagtatccagccggccagctgcagggacccaggccacgcatcgga |
| | | gcatccggtaagtgtgacaacgaccacttgcttgatatacgcaacgaccctgccaaccctagctttattgccctggtcccgccggg |
| | | actgcacaacaacctctcgatcgagtcaaccaccgacgaattcggattgggggcagccaccagcacggggcatgcatccttcgaac |
| | | aatggtgggaggatggctttgtccagcaagcagtcaacgaggcgttgatcgctgccggcataacggacgcccagagggatgacgcc |
| | | aggggcctggtccgcgcaaccgcagcctcggtcgacgaggtggatccagacaagggaggtcatcgcgcggcctggcgcctactctc |
| | | gcgcatctactcgatagcaaacgtgaatcaagggttgcctgcaggaacagcgctatcactggcatgtggtcttcccccaatgaagg |
| | | agggaggaatttccgccaagactcagctttcggtcctgggaaaaatcgccgacgagcttgcggacggtttcaagactggcatcgag |
| | | cgcctggcacaaggcgtccaacaaggggttgcgcaagcgctgcgcgaactgctttcccatctccactcgaattgcgacgtacctac |
| | | ggccttcgagcgtgccacagcggctttctacctgcccagtgccgatattgaactggcgcctcctccatcctggtggaccacgctca |
| | | ccaccgagcagtggacggaactacttgccgacgagcctgacgaggtcgtcggcgagctaacgatccggtgtaccaatagtttgatc |
| | | cctatggggaaaggcttgccggccgtagtacgggacaaagtcgagctattgatttccacaagcgaagagagccaaccaaaggagct |
| | | cctgttgacaggcggatcctacggcaaggttccgacgtcattgccagcgggccctaatgggactaccagccacattgacctatttc |
| | | cctcctcccacaaagcgccaatgagctacaaggtttccgcggacggctgcaagcctgcgagcgtccgggtcatctccctcgcgagc |
| | | tggaagcccggaatactcgttacctgcaggcttgcgacaaagctctcgccaccgaggaagccccgcaagaactcagctgcgatgga |
| | | ctgggaaacatccctgtcgctgccgggctccggtcgttatgagctccagctccaccttgctccgggggcgagcattggaaaggtag |
| | | aaggcttgccggacgatgccaccgaattcgaggagcagcgggagacaatcgaaccacggcaagttggggaatacgagtatctaata |
| | | gaggtcgaggctgatggcaagtaccagctggacatcgcctttactgaagccggcgagcaagttccgaaggtctgccgggtatacct |
| | | gacctgcgaagaggcaaaggaggaaggttgcaggagcgaattcgagcggctcatcaagctcaaccgacggcatctcgagaagttcg |
| | | ataccaaggctgttgtccatcttgaccggaacgcacgctcctccagcctgcagtcgtgggtgctggaggatcagaacgtatccaat |
| | | tccttcaggccactggtgatcgcggacgactatgcgtcccggtgggcccctcctgactgggacgccccgcacggccctgtactctc |
| | | gaacgggcgtttccttcatgacccccgccccgaggccacgagcttccaacctcccaagggcttcatcgaggctcggcaggggatcg |
| | | cccggtacatacgtggtagcgacgaccaatcggggctccttgagtcagcgccgcttggtgcctggctatccgaagaccctgggttc |
| | | cgctcccttgtcgaggactaccttggagcgttcatgtcttggctggacgccgacccgggtatcgcctgctggatcgacaccattgc |
| | | cgtctgctccctggagccggatggtcgtaccctgggaaggatcccagacgccatcatcctttcccccctgcacccattgcgcctcg |
| | | catggcactgcttcgcccagaaagtactccgtgacgaggccgagggcgaagccccgtgcccggcagcaagcatcctcgatccggac |
| | | tgcgtccccgatctadgaccatctcgctgcaggcaccgggaggagtggatcaggtcgacttcctttccgtcgaatgcagctccgac |
| | | tactggtccgtgctttggaacggatcccggctgggacaaatacccgatcgcgctcgccgggccccgttcgacagtagcttcgggct |
| | | ggcagttggagggatatcgagcgggttcagccccgcccaggtctcacgagcactcgacgacgtcaccgacctcctggcagccaagc |
| | | ctatcgtcagcctggtagtgtccagcgcaggtggcaccacggatgcatgcaacgaagggttggccacctggtgcaccaagcgattc |
| | | ggcaacggggaccatgacaccccgcggcacggtgtcgggccaaggattgtggaggtattcgataccaggcaggctggccggcccga |
| | | ccaggcgacgatcgccaacctctccgaggacacaggcaaccacgtccgctggtatgacaagcaaccaactgggtccaagccagacc |
| | | tgggcatcattgcccaactagattcggcccaacccgaatccaaggaggtcggaatgctttcgccgatgggaaccggcggactgatc |
| | | aggcaccgcgtcaggcgccaactccaagcctccttcctaagtgaatcccggcagggcctgcagatgccaccctccggcgaaccgtt |
| | | cgcagataaggtttccgcatgcatgctcatgatggaaaggctcagggacggcaaggtcggcctgcagttctcccctaatgtccatg |
| | | cagtgtccagcatgctcgaggaaaacagcgctgggttcgtcgctgtatcgtcgtcagcaatcgaccccgcctgcttcctcggaggc |
| | | tggatacaagggacgtatctatgggactacgacctcccctcgtactcgcatcgcgcaggcgacacaagcggctactacctgttatc |
| | | acaggtcaagcaggctgatcgcgatgcgctacggcgagtcttgaagccccttccgggatgcgaggatctggacgatgatcaggtcg |
| | | agcaaatcctcctcgaggttgcgcggagggggattcctacggtgcgaggcctctccggggacgatacgggggcgacgggcgacctt |
| | | ggcctgttcctcgctgtccggctcctacaggatcagttccgtgtgacaggcaacaaggaaagcctgctgccggtgcttgccggatc |
| | | accggaggactcgacgatagcaataatcatccccgtcgaccccttccggggttacctttccgatcttgcccgctcccttggcaagg |
| | | agcgcaaggatacctccctgtcgcgtcccgatctgctggtagtgggcgtgcgcgcatgcagcgacaagatccacctgcaccttacg |
| | | cccatagaggtcaagtgcaggcaaggagtagtcttcggtgcaggcgaatcaaccgaggcactctcccaagccaaggccctgtcgtc |
| | | attgcttcgtgccatcgaggaacgtgcaggtagttctctggcatggcgccttgccttccagcacctgttgctctcaatggttggct |
| | | ttggcctgcgagtctacagccagcatcaggcagtaggtgggcatgccggccgctgggctagctaccatgaacgtatcgctgcagcc |
| | | atactcagcccaaccccgccgatcagcatcgatgagaaggggcggctgatcgtggtggacgcgtcgctccagagcagcccgcatga |
| | | tcgcgatggcgacaagtacacagagaccattgtcatttccagccgagatgccggtcgtatcatcgttgggaatgacgcacagtcct |
| | | tctatgatggcgtacgtgcaaaggtcgacgactgggggctgctaccctgccaggcaagtgcggccggcaccccaatcgtgcagccc |
| | | gacatcactcccccggacgatgtccagacgggcgaccccatagtagtcccagcagaagatatccccggggcatccaccagtctggt |
| | | cgatcagacatctaccggcgtagcggaaccaggggcaagccctgcccccccaactgacgagccagggacagggatcattctctctg |
| | | ttggcaagactgtggatggtttcgagcctcgatcactatccctgaacatatccgacacccggctcaaccagttgaacattggtgtc |
| | | gttggcgacctcgggacaggcaagacccagttcctcaaatcgttaatcctgcagatatccagggcccgcgaggccaaccgcggaat |
| | | cacgccaaggttcctgatcttcgactacaagcgcgactacagcagccaggactttgtcgaggccacgggcgccaaggtggtgaaac |
| | | cctatcgcctgcccctgaatctcttcgacaccacggggatgggggagtcctccgcaccatggctggacaggtttcgcttcttcgcc |
| | | gacgtactcgacaaggtgtattccggcatcggccccgtgcagcgggacaaacttaagggtgcagtccgcagcgcctacgaggtggc |
| | | tggtgggcaaggccgccagccaacgatctacgatatccatgccgagtaccgagagctgctcgcagggaagtcggactcgccgatgg |
| | | ctatcatcgacgacctagtggacatggaggtcttcgcgcgctcaggggaaacgaagccgttcgacgagttcctggatggagtcgtg |
| | | gtgatatccctcgattccatggggcaggacgacaggagcaagaacctgctcgtcgccatcatgctgaatatgttctacgagaacat |
| | | gctacgcacgccgaagcgccccttccttggcacgtccccacagctccgggccatcgactcgtacctattggtggacgaagcggaca |
| | | acatcatgcgctatgagttcgacgtgctccgcaagttgctactgcagggccgcgagttcgggacgggcgtcatccttgcctcgcag |
| | | tacctgcggcatttcaaggcaggggcaaccgactaccgggaaccattgctgacctggttcatccacaaggtacccaacgcaacacc |
| | | cgcggagcttggagtactcggcttcacctcggacctggcagagctatcagagcgagtgaagacccttcccaaccaccactgtctct |
| | | acaagtcattcgacgtggctggagaggtcatacggggactgcctttcttcgaactcaccaaccaagcctgaccaacgcccggcctg |
| | | cgaatacaggccgggcaaggaggctcctaatgacagacttcctttctcccgcagaacgctcggacaggatgtcacgtatccggggc |
| | | aaggacacgcagcccgagctagcattacgcaaggtccttcaccggctcggactccgataccgattgcatggcgcggggctactagg |
| | | caagccagatctcgtgttcccgcgatacaggaccgtggtattcgtgcatgggtgcttctggcataggcacaagggatgcaatatcg |
| | | ccacgatccctaagagcaacacacccttttggctggagaaattcgaaaagaatgtcgtacgtgacgcgcgagtagcaacagatttg |
| | | caggccttgggatggacggtacttgtcgtatgggagtgtgaactgacatctgccaaaaaagcccagaagactggcgaacgcctata |
| | | tgaggttatccgtagtcgtagccacggaaagtatcggtaatcgactgaagcagccctgcggcctgtagtggtctactgatcccgga |
| | | caccgatttaggcgaaaatcctcgccgtgagagaggtgtccg (SEQ ID NO: 59) |
| 63 | pLG065 | cgaacggagcaggtagatccgcgctaactgacttgcccaatctggctgcattcgtccaacgctaggcggcttcgcaggaaaagcga |
| | | aacggagggagattctacgcgcacctttgtgcagacctgaggctccaccagacctgagagcccggcacgattgactgatcatagga |
| | | gtaaggccaagaagcgacttgatgcgcttgtaaggtaaattctcagcgaatcgaagtaatgacaccgaaacacgtgcggtcgacaa |
| | | ccgtgtaagattgctgataaaaagagcaggacgtcacaagaaatgaacttggaagtagtgccggcgagccggactttcatcgacct |
| | | cttctcgggatgcggaggtttgtcgctgggactttgccaggctggatggaaaggactcttcgccatcgagaaggccacggatgcgt |
| | | tcgagactttccgggagaacttccttggtgagaactcccgctttgcctttgattggcccagctggttggagcagcgcgcacactcc |
| | | atcgatgacgttttggcactgcgcggtctacatttgtcgaaaatgcggggtgaagtcgacctcatcgcgggtggtccgccatgtca |
| | | aggattctcgttcgcgggcaagcgaaacgcgaaggatccccgtaaccagctctcccagcggtacgtcgatttcgtcgagcgactcc |
| | | agccgaagtccctagttctggagaacgttcccggcatgaacgtcgcccataagtatgagcacgggaagagtcgcaagacttactac |
| | | gaaaagcttctgcattcgctttcaatagccggctacgtggtgtcggggcgtgtcttggacgcggctgacttcggcgtcccgcagcg |
| | | ccgcactcgactaattgccgttgggattcggtcggatatcgcggataagcttgcatgcgcggctagctcgactcccgcagacgtgc |
| | | tcgagggcatcttcgatgcaatcaatcaggcaggcaagcgtcagctcgtccgatatggccagggcgcccatgtcacggttcgggac |
| | | gcgatctctgatctcgcgattgggccggccgatcacgagaacaccgaagactacgtgggaagcgagcgatgtgcaggctacaggca |
| | | ggtcaggtaccaggggccgaacacgccttaccagatcgccatggcttctggggtcaccccatccgaaatggacagcatgcgacttg |
| | | cccgtcatcgtcctgatgtagaaaagcgcttcaaggcgatccttgaaacttgcccgcgaggggtcaacttgagcgccgagttgagg |
| | | gcgcagcatagaatgctgaagcataggacggtgccgatgcatcccgaaaagccggcgccaaccctgactaccctgccggatgacgt |
| | | cctgcactaccgagacccgaggatcctgacggtccgggagtacgcccgaattcagtctttcccggactggttccgtttcaagggca |
| | | aatacaccacgggcggggcgtcccgtcgtcatgagtgcccgcggtacacgcaggttggcaatgcggtcccgccgctgctcgggcag |
| | | gccattggctcaggattaatggcgtgcctctctttgagttcaacgcgagtgataagggccagtgcgcccagtctcgcgatggccga |
| | | gaaaaaggcttttgccgtatagcaattagtcagctgcaagaatcgaacaggtggatagacgatgacgaaataccccgatggattgc |
| | | ttgattggtcgggcaatcgggctggaggagtcaagaaactcttctacggcggcagcggccgccccgtcgggaaggtgatagagact |
| | | cctctactcacccgtctctgggaatggtcggatagcgtcgtccagttcgagccgggcattccgcgggcggtgttgctgttgggagg |
| | | gccgggaaacggcaagacagaggcaattgagcagacgcttcgccgaattgactcaaggcttgcgctgagcggagcgctcatcgaca |
| | | agcttgcggctgtcttcgagtccaaggatggagtccccccaggacgccttgtggaggtggatcttggggcgctttcaggggggcgc |
| | | tcgagcgggacaatctcgattgtccaagacgcctcggaggggaatccgggctctcctgatcttccggcgcaattgctctgcaacga |
| | | cctagcaggactcgtcgaagacaacgtgtcaaagcgcatctatttagcgtgcataaatcgcggcgtcctagatgatgccctgatac |
| | | ttgcgacggaaagaggtgacacagaaattggtgctttgctgaagcaaatcatccggtcggtgtcgatggcggcccatggcgtctca |
| | | tgctggcctctgcagggatatccgggcatcgcagtctggccaatggatgtggagaccttggtcgcaggcgtccagggtcaaccttc |
| | | acccgcggagcaggttcttcatattgcggccaatgccgaccattggcctgatttcggggcatgcgaagcgggtcagtattgcccgt |
| | | tttgcacaagtcgcaggctcctttccggcgagccccatgcgggatctctcgccaagctgctccgatggtatgagctggcgagcgga |
| | | aagcgctggaacttcagggacctgttttcccttgtcgcccacctgttggctggaacccctagcaatgccgatgcgtccggttattc |
| | | gccctgcaaatgggcggcaaaacaactgaatccccccggcggcgacccgcgcaaggccgatgtactccgaaagcgcggagtctttc |
| | | ggttgctggcttcccaataccaacacgcgctctttggcgactggccaatcgagcatgcgtcgggtctccgaagagacatcgccgac |
| | | ctagggcttggtgatttcccggcgcttgtggctatccagcagttcctggcgctggataagcggcgggagtcgacggcaaccctccg |
| | | tgcccagctctccggcatgtcatccgtattggatccagcaaaggcaagccccaccttcgaggttagggtaagcgctaatactgtta |
| | | ttcgttacgaagacttggataggcggttcagcctgtccatccaaggaggcagagagtacctccaagaatatcagtgcctctcggag |
| | | atcgagatttcagcactcaaggtccttgaggaggccgacaataagttgtctgatcacttagtcaggcgatctcggccggcgacagc |
| | | aattcgagtccaggcgcttctgagggccatcgcgtgcaggctggcaaggaggtcgattggcgtcaggtgttgtgtcacaaaggatg |
| | | ccgacgtcctcgaggagttccaccgcgtcaccaatggcgattcgtcggcgctgcagcaggcgatcaggcaggtcgaggcacttctc |
| | | aacgtcaatcgccggttcgttgtttgtctcaacaacacctttggtgagccgctgcctcccccagagcggcgcgcgatgcttaccac |
| | | ggacattcagcgcgttaagccggtgcccgccttggagggtgttgagcggccgagatcgccgatgcccttcctgagggtcggcgcac |
| | | aaggcaacgccaggcccatagccctgaccttcgatctcttcaaggcgacgaaatcccttaggcgtggcatggtcgcgtcgtcactt |
| | | ccgaggtcggtggtcgcgcttctcgatacgacccgagctggtcttgcgggagcgatcgtgcgagacgaagacgctctggaaggtgc |
| | | ggagatccggatcggaatcagggatgaggtcatagtgcggacctttggaagtttcgtcatccgccaggagggtgcttgatgtccat |
| | | gcaggagtttctcgcttcaccatggaagaaagaagcctcgcaccgagccttcaacgaatcctcttttggtatgaggtctgccccgg |
| | | agttcgcaactggcgaggtcgtcctgtcttcgctctaccgcgccgtcggctttgacggggtttccgaggagaaagtgccctcgctt |
| | | ggcaatgatttcaggaaggcgctggacaaggaacgcagaaagcagaacgcagctggtggtctgagcccagaagcctggcgcacggt |
| | | cgtggatcgtgtcgtgcaaagtcctaaggttgcgcagcaatcctccaagcgattcctatcgctgtccccggtcgttcccgacgcgg |
| | | ccatctactcgggcgccgcgcgccttggaggaaactcctggaacccggggcggctgatcaagcaaatggtcggaatcgggtcggag |
| | | accatggagggcgcggaaacgctttggggcgaactctacgatgctttgtccgtgacggaagcggatgatgtctgggcaagatggct |
| | | ccaaacagaatttagtcccaggcgcccagagcaaatagcgtgggccccaagaccgatggatcaaccagatttgcttccgcaatccg |
| | | atagacggggagtttcctatcccgctcggcagttcgtggtggacctgcgaggaatcttggatgcgaagtccgccatgacgcggcgg |
| | | cagtggatcacactgctcgaggcgctacttcgaattggatcggtcagccatgtgctgtggctgtgcgacgtcaatgaccgcttgtg |
| | | gcgtgcgatgcgtgcggcgctcgagggcgaggcgagtggcgtgcccgccgatgccgccgccataagaaccgacattctggccgtca |
| | | ggcggcggacgctctcgttcgggaatcccgctgtcccagcgattcgggacctggcctctcgatacctatccgcacgcctgggaatc |
| | | aactgtgtcctttggacgctggacgaacttggcgtgggctcaagtcgactttgttcgtccgaagaaatccttgacttcatcaagag |
| | | cgttcaggccaacgcaggggggctcaaggcccgtggcgtcatggatgccttccattccctgcaagacaaggaagtcaggaccattg |
| | | gctgtaagaaaggagtcggagcaaaccttctggaattcagccagtacacgcttggacagaggcagacgatggaccaggcactccgc |
| | | gggtacgaccagagctatttcctcaggaagaacggggatgccaggaacgcgccatgggttctatctctagggcccgctgccgtact |
| | | tgcgatggtccactcgtgcctacatgcggtggatggaccgcgatcgatacaaaggctttcatcccatctcgggagctacggcatcg |
| | | agtttgatctccacggcgtcaacgatagcgtccttggaaagcaactccgaatgctcggactcgtactggatagcccggatgccgag |
| | | agcggtatgctccttgtgcccccgttcgtagcctgaggaaggaggcaatgatgagcacgctagccaagggaattgcaagctgggtc |
| | | gaaaaagccatggcgcgtgagatcgcgacgctggtggccgggaatatggagtgtcgcgcagtcttctgcggcccgccaaagcacat |
| | | cctgaatcaagtatttgggcatcttatccacggtcgatcgctgatcgaagcgacaagggccgatggtcaggcggttcagtatcccg |
| | | tgatccttcaggtcgaccgcctccctacagggtttcccatcggctccgccacacagtcgggatgccttcagttccatggactcgct |
| | | gccgtcaggaacgacaggaatggtgttttcctagttcttgtcgagcccggtgctcaagcgagcgatacgcatgaatcaactcgaac |
| | | ttcgcttggactcgagccatcggtaaacgagggcggtgcctcgatcattgcctggtggtctgatccattcattcagtcgcttgttg |
| | | attctgccctctcagaactctccggtcgcgacgccgcggctgccaaggatctactaaaggaggcgatgatcgccgccgacgcggca |
| | | gatcagcacgaagtagcgagagttggagcctggcgcgtcatcgaacggttgtgggagctaaaagaacgcggcttgtctcttgacca |
| | | actcgttagcttggccgccggattcccgccctctagcgacggaagtattgaaccgagatccaagaccgccatcctttcagccatcg |
| | | tggacaggatcgaagccgagaacttcggtggcttactgtcgtcccttctgcaaaaagccagggacgatatcgaaaaagaacacatc |
| | | accgcgtgcctctcgaatatgaggggcaggtgcgatgtggttactgcggttcggcgatgtgcgccatatgcgtacatgccttcgga |
| | | cgccatcgctggcgaagtctggtggaagtcgctcactgtcgagcgctgggaagagttgctcgatgatggcgctctacccgatgcgg |
| | | gcggcgacatcattattcagtgtgccaatccgatgatttcgcaccttaagggcatggttcccgtcgtcaagggatccgtgcaactt |
| | | aggatcgaggttccagagaagtacgtgggcaggcggttggaggttatccgcgaggtcccgggtgcgaaggcggcgacgaaggtttg |
| | | gacagttgacgcggaacgcatgatccacgtcgaggacgacgagatccccccccacaagagtccgatgaagtactcggcaagcctcg |
| | | aaggatcagccggaaagaaggcgagcgttcgaattgtctcaatggatggctggctccctggggtggttgcctctgcgacgacggcg |
| | | acaaaaggttccctcccgaaacgctcaaaagcagcgaagttagaggcgtcgctgtctctctccgggcaggggaggcactaccttga |
| | | catctacttaaggccgggcgtcgagctcgcgtcaatgctcgccaccggtagtgacgaggaaggaaatccagacccgtccatcacgg |
| | | cgccaatcggcatggtcgcggagggcgagttcggggtcgaaatcgaaatcgaaggggaatgcttcttcgacatcacgctcagggtt |
| | | ccggaggttgcggatgatcaggtcatccggatcgaattgtcggcggagcaatcaagcccggaagagtgctcaagccacttcgaatt |
| | | gcagctccttaagaactctagcggtcggaagcccagcgcggtccacgttaatgctcagctaagaagtgcgcagcttcaaggttgga |
| | | tgctggagcaggggcgcgctggtcgctcctattatcccttcgttatggccgcggactatgccgccgactggcacaggcgggactgg |
| | | actggcgcagatgacacgatcttctcgaaggctagcttcctgtgcgatccccggccctcgccggaagaaatggcgccgccgcaggc |
| | | tttcatagatgccagagccgcactggccgccaggatcaggggtggtgacggaaatggcttggtcgaaggtgtgccgctcggtgagt |
| | | ggatggcaacggatcccgatttcgccggggaaatagacgtctacttgaaatcctacatgcactggcttgcgagcgatccagatggg |
| | | gcggtttggtgtgacgtagggttggtcgcgcggctcgagcctaacggacttaccttggtgcaagagccggatgcggtgatagttag |
| | | cccgatgcatccggtaagacttgcttggcactgtgtggcccagcgagccatgttccttgccgcacgaaagagaccttgtccagccg |
| | | ccagcatcctcgatccggattgtgtgcccgatgcgatcactctcccactgagaaacgccatgggtggcaagaccaacgccactttt |
| | | ttctcggtcgaatgcagttcggactactggtcgattctttggaacgcggggcgcttggaagccctttcttcacatggggcgacagc |
| | | cccgcttgaccgggagtttggcctactcgtcggcggaatctccggtgggtttagtgtttcgcaggtgcacaaagcgctcgaggaca |
| | | tctgttcgatgctggtggcgaagccggtcgtcggcgtcctggtgtccagtaccgcgagccagaacaatgcgtgcaatgaaggtctg |
| | | ctttcctggggcaggaagtacttcggcggcggggatagggcggcaggcttggacgcctgggtcggggccagcgaggtcaggatcta |
| | | cgacgacagaccggaagatgcccggcctgatgatgcggagatttcaaatctggccgaggatacggcgaacgccgtgcactggtatt |
| | | ccggcacggtggccggcgaggctcccgatctagcgatcatcgcccagcttgagacctccaatcccggtgcactcccaaccaaacta |
| | | aattctccgttgggcttcggtgggctcgtgaggacccgaattcgggagccttccagcatggcggggggtcaactgctccgtgagtc |
| | | gcgcatgtctggtcccgcggcgcccactggcgacgggctggccgacgctgtagcaagtgccatctcgtcgctcgagaacatctcgg |
| | | agcaacgccttggttacgtattcgcccctagcattcatgtgatcaagggggcgctggagagcgcggaatttgccgcagtttcctct |
| | | tcgagcgttgacccggcctgctttctcggaagttggttggagggcacctatctttgggactacgagctcccgtcgtactcaggtcg |
| | | tgccggagacagcaatggctactacttgttgtcacggatcaaggatctcgacctcgaaaccctgagaagcgtggtcaagaggttcc |
| | | ccggttgcgaggagatgccggaagccgtgcttgctggaatagtcgaggaggtcgcacggcgtggtattccaaccgtcaggggcctc |
| | | gccgcaggtgattctggcgcgacgggtgatttggggctactcgtggccacgaggctgcttcaggatagcttccgggcggccgaatc |
| | | aggcgctggtctcctgacgccttggcgcagggagggagacatcgaagagcttgctctcgtcattccggtggatccattccagggct |
| | | atcttgacgatctcgcgaaggcgctaaagcgccctacgctccaccgcccagacctattggtcgcgacggtgcgaatcagtgacctg |
| | | ggagttcaggtccgactgactcccatcgaggtcaagaaccggggtgctggagcggcgatgccgcaatccgatcgagaagccgcgct |
| | | tgcccaggcacgctcgctggcatccctgctagatgcaatgctggcaacgtattctgaggatcaagagatggttctctggcggattg |
| | | cgcaccagaacctcttgacctcgatgatcgggtacgcattccgtgtttacagccaacgtctggcagcccaaggcaagtcgggagac |
| | | tggtcgcgcctgcacgcacgagtcatggaagcaatcctgagctcccaggccgatgtgcgggtggattcgagaggccgcctgatcgt |
| | | gatcgatggctctagccaaagtggtccgagggatacagatggagatggtttccacgagactatcgagctctcgcacaaggatgctg |
| | | cgcttttcatccgtggcgagcacgatgcgctctgcacggccatgaagcagaagctaggtggctgggaaatgttccctgaagggagg |
| | | gatgccggactctccaatcaatcgccgcccgtggcccatgagactgcgcccttggtggatggcggcgttgaggtgccgtcccttca |
| | | cgcgctccaagcaacggcggggcccgagggcagctcgctgccgtcttcgggagtcgaagccatgggcgcgtcgcagccggcctccc |
| | | cgggagccatcgacgtggatggcggcatggcccagtccgggctgatcattcgggtcggtgaaacgatcgatgggtttgagagccaa |
| | | attcggcggctgaatcttggcaacacggccctgaaccaaatgaacatgggagtcgtcggcgatctggggaccggtaagacgcagct |
| | | gctccagtctctggtttaccagatagccaaggggaaagatggaaatagaggtattgagccgagcgtcctcatcttcgactacaaaa |
| | | aggattactcttcgaaggagttcgttgatgcggtagctgccagggtcattagccctcatcaccttcctctcaacttgttcgatgtt |
| | | tcaactgcatcgcagtccatcaatccaaagctcgagcgctacaagttcttctccgacgttctggacaagatctattcagggatcgg |
| | | gccgaagcagcgagaccgccttaagaactccgtcaaggacgcatatgtgcaagccgccgaagggcagtatccaacgatttacgacg |
| | | tccatcgaaattacgtagaagcacttgatggaggcgcggactccctgtcgggaatcctaggcgacctcgtagacatggagctcttc |
| | | acgccggatccaagtgtcgttgtttcgtcggccgaattcctgcgcggagtggtcgtgatatcgctaaatgaacttggttccgatga |
| | | ccggaccaagaacatgctcgtggccatcatgctcaacgtcttctacgagcacatgctgcggatacagaagcggcctttccttgggg |
| | | agaaccgcaatatgcgtgttgtcgactccatgctgctcgttgacgaggccgacaacatcatgaagtatgaattcgacgtcctgcgt |
| | | cgggtcctcctgcagggacgtgagtttggcgtcggggtgatcctcgcttcgcagtacttgagtcacttcaaggcaggtgcgacgga |
| | | ctaccgggagcctttgctttcctggttcatacacaaggtcccgaacgttcgtccgcaggagctttcggcgcttggctttagtgatg |
| | | cggtgggattgccgcaattggcggagcgtatccgtagccttggcgtccatgaatgtctctacaagactcatgacgtgcaaggtgag |
| | | ttcgtccgcggcgcgcccttctacagacggggtgagtgggccaaggaatgacttttcgtcgtgtcgatttatcgcctagttacgct |
| | | tttggtcttaagttgcgttcctaagagaggtgggctgtgtccgacaatgcgtattacgtttatgcgctgaaagatccacggatggc |
| | | gcccgcccagccgttctacataggtaaaggaaccgggacgcgctcccatgaccatcttgtaaggccagacgattcaaagaagggaa |
| | | gcaagatctccgagatcatggcctcagggcgtcaggtgctggtaacccggctcgtggacgggctcacagaagagcaagcgttgaga |
| | | attgaggccgagcttattgccgcttttggcaccctcgatactggggggatgctcctgaattccgttctgccaagcgggttggtaaa |
| | | caagagccgtagctcgctggttgtcccgtctggcgtaagggagaaggctcagattggtctggcccttctaaaggacgccgttctgg |
| | | agctggccaaggcgaatccgactggtatctcgaactccgatgctgcgagcatgctcggcctgcgtagcgactacggcggaggatcg |
| | | aaggactatctgtcgtacagcctcctcgggctgctcatgcgggagggaaagctcgctcgggttgccggcactaagcggcacgttgc |
| | | tcaagtgagctagctgtggggttccggatcgggctggcccgctcggcgctgcgctacgaagctcgcttgcctgccaaggatgctgc |
| | | ggtcatcgaacgcatgaagcactacgccgcgctgtatccgcggttttgctatcgccggatccatatctatctggagcgcgagggct |
| | | tccatctcggctgggaccggatgtt (SEQ ID NO: 60) |
| 64 | pLG066 | gatggactggtactgtagattcaccgtggaccagcgaatctattatgtggtgagcagaacattaacacatcaatgtaacgccgtaa |
| | | tcattgagtctttgccggggacgcttgacatctccgaaagaattatatcgtgagtcttaaggggaatctcttgcttccggttatac |
| | | atttaaccggatctagctataagactgttacatctattgggattaggtcaggacagatagcctgaaagcttttatagtgagggact |
| | | tcagaaataccctagaaaaggaactgttatggtaggttcgcgctggtataaatttgattttcataaccatactccggcttcgcatg |
| | | attacaaaattcctgacatcagccccagagagtggcttctggcttatatgaaacagcatgtcgattgtgttgtaatcagcgatcat |
| | | aacagcggagcctgggtcgacgtgttgaagggtgagctggagaatatgtcccgggacgccagcaccggcgacctgccggaatttcg |
| | | gccactgacactctttccgggggttgaactgacagcgaccggtaacgtacatattctggctgtgctgcacacgcacagtacaagtg |
| | | ccgatgtggaaaggcttctggcccagtgcaataataatagccccattccgagtgaagtccctaaccatcagctcgttcttcaactg |
| | | ggccccgccggcatcatcagtaatatccgccgtaatccgaaggctgtttgtattcttgcgcacattgatgcagccaaaggtgtctt |
| | | aagtctgactaatcaggcagagctcaccgcagcctttcaggaaagtccccatgccgttgagattcgacaccgggtggaggatatca |
| | | ccgacggaacccgccggcggctgattgataatttaccgtggctacggggctctgatgcgcaccatcctgaacaagccggcgtgcga |
| | | acctgctggctgaaaatgtcatcccctgattttgacggactcaggcatgcactgctcgatccggaaaactgtgtgctgtttgatca |
| | | gctccctccggaggaacctgcgtcatatttgcgcagcctgaaattcagaacccgccactgccatcctgtgggtcaggattcggcct |
| | | cggtggaattcagcccgttctataacgctgtaatcggctcaagaggcagcgggaagtccacgctcattgaaagcattcgtcttgca |
| | | atgcgcaaaacagaaggtctcactgcgacccaggggagtaagctggaccagttcattcggacggggatggaagcggattccttcat |
| | | cgaatgtattttccacaaagaaggcacagatttccggctcagttggcgaccagacagtaagcatgaattacatatcttcagtgacg |
| | | gagaatggatgcctgacagtcactggtcggctgaccgttttccactctcgatttacagccagaaaatgctctatgagctggcttcg |
| | | gatactggtgcattcctgcgcgtctgtgatgagagcccggtggttaacaaacgggcctggaaagagcgctgggatcagctggaaag |
| | | ggaatatctgaatgaacaaatcacgttgcggggcctgcgtgccagacagggaagtgcggattcgctgcggggggaattatcggatg |
| | | ctgaacgtgccgtcagtcagctgcagtcaagcgcctattatccggtttgcagacagctggccctcgccagaaacgagctgtccgca |
| | | gcaaccttacccctggagcactttgagcggcgtattgcagccattcaggctctggcagaagaaccgctgcagagatccgatatccc |
| | | gccggaaccttccggtctgctgatggcatttatggcgcgcctgtcatctgtgcaacagcagtatgaccagcggctcaatactctcc |
| | | tggcagaatatgctgcagagctcgcgggtatcaggagagagcaatcttttattgccctccgaacagcagtgagtgaccaggaaaca |
| | | aatgtagaaagtgaagctgtttccctgcgggccagagggcttaatcccgatgttctcaacgaactgatggcacgctgtgagtcact |
| | | gaaaaatgagctgagaaattacgacggtcttgatggggcgatctctgcctctgttgcacggtctgagcagttgctggctgaaatgc |
| | | gtgcccacagaatggcattgacagataaccggaaggcgtttctctcctccctgtcgctcagcgctctggaaatcaaaattcttccc |
| | | ctctgcgccccttatgaagatgttatatctggttaccagacggttaccggcatcagtaattttgccgaacgtatctacgataacga |
| | | tgacgggagcggattactgagcgactttatcagtgaacgtccgttcagcccgttgcctgccgcaacagagaaaaaatacagggcgc |
| | | tggacgagctgaaagcgctgcatcacagcatccggctggataattcagaggctggggcggggcttcatggttctttccggaatcgt |
| | | ctcaggagtctgaatgaccagcagctggatgccctgcaatgctggtatcctgatgacggcatccacatacgttaccagacccccgg |
| | | ggggcagatggaagacattgcctttgcttctccggggcaaaagggagcgagtatgctgcagttcctcttatcctatggcaccgatc |
| | | ctctactactggatcaaccggaggatgacctggactgcctgatgctgagcatgagcgtgatccctgccatcatgtcgaacaagaaa |
| | | cgccggcagctgattatcgtgtcgcactctgcccctatagtggttaacggcgatgcagaatatgttatcagtatgcagcacgatcg |
| | | cacaggcctgtatccaggactctgcggtgcactgcaggaagctccgatgaaggcactgatatgccgtcaaatggaggggggagaaa |
| | | aagcgtttcgttcgcgctatgagcgtattcttagctgaagaacggaaccgtccttaaggcggccatgaccggagagtgggcctggc |
| | | ggctgaatgcctggataaaagacgcaaatgtcagactgatggcctctgcgtctttg (SEQ ID NO: 61) |
| 65 | pLG067 | cctggtcctgccaattgctcccccagccatatgacataatccttttgaataatagggtttttatgcttgtactctagcccattcgc |
| | | ggtatcattttacgatctctcttccagttttatgcttaccgcctttgcctatcgtagaacaatgccgggaagcgttatcagcgatt |
| | | aagggcaaggaatgagaaaaagctggactatagaggaagattgtaagctgctaaccttggtgcgtcagctcttttccgcgctggtc |
| | | agccataaccggctgaatgccacaatgccatttagccagcagctccacgatgcatttgactcacctgaccgcgatgccgcagcatt |
| | | gctttatcgcctcgaacaggcaaaaatcttgggatttgccagccgtcctggtggcgatcccactaaacaactgtttcgctgcctga |
| | | taagcaatgatttggcgctatacgattacagcctcacctttcccaccctcagaaaagcattgcatccagataccgttgcggcagca |
| | | ctaaaccacttcacgattagcaatccacacgaaccactgtccaatactatcaatgaaatcgcgacagccttgcatcttgcccccat |
| | | acaggtggaaaagattctgatcgacagcggccaaataaccatcaatagttaccgcaagtgtgagcgtgttggagagaaaaatatca |
| | | ataataatctgcaagatctcatctctaggcaaattcctgacataacgctgattaaagagattaacgcctgtcgcgcccaagtctct |
| | | caactttaccacgtgcatgaacgtgatggcgctgaggtcatcttcagttccgacggcacggggttcggcaaaagctatggcgtgat |
| | | ccaagggtatgtcgaatatctggagcgcttcgccaaaacccaaaagtcagacgatctgtttcctgaaggtggctttaccaacctgc |
| | | tattcatgtcaccgcaaaaatcacaaatcgacctggacagcagtcagaaagagaaaattctggccgctagcggcgagttcatttgc |
| | | gttctctcccgtaaggatgttgccgacctcgactttatggactgggcctctggtctgaaaaaccgcgaccgctatattcagtggta |
| | | cgaaggggcgaaaggcagcaaatatatcggcggcgctatgcgttcgctcaattatcatgtcttacaaattgatcgctgtgaagagc |
| | | agttaaaaaagctgacaacatacggttctcaggataccaactacgaaagagaaattctcgaagaacagctaaaaaactgccgtcac |
| | | agtatccgcaatacgattgagtcagcctgtaaattactatttggaccagatagtgaaaaagcttccattaaagagtacattcgtcg |
| | | cgggctccaggcgcggcaagagcgaatgcaaaacgcggagacagcacgaaaaccaggaaagcttgaacctaagataagcgtacacg |
| | | aagtctatttcgagcttatcaaacaggtattgcctttcgaagtttgccagtaccgcccgtcagtgctattaatgaccacgaataag |
| | | ttcgacacatcaacttaccgactggcgcctcgtcagcgaggcgaaggtgtgcgttttgagtccgtaggtttcgacttgctgattgg |
| | | cggtaagctgactcccaaagatccacagattagcaccgttgcggcagccggtcataccgggcaggttacctatcttcgcgacgaac |
| | | acttcagacgcaatccagattgtccttttcgccagaaaaatattcgttttacggtgatcattgatgaactacatgaagcctacact |
| | | cgccttgaagaaacatgccatgtaaagctaatcacacaggaaaataacctggcgcacgttatttccgtcgcaggacgtattcacaa |
| | | cgcggtactcagcttagaacgccgaaacaagcccaaagaagcgcaaacgacctttgagcaagagatggtcaaattcatcactactc |
| | | tgcgcaatttactggcggaaaagtgcgaactatcccccggtacaaggctgggatcgatcctggagatgtttcgtgaccagttaggg |
| | | gcatttgaagtcaacggcgacgccgccgaacgcatcatctcaatcacccgcaacgtattcagctttaaccccaaaatgtacgtcaa |
| | | tgaagaagggctgaaacgcattcgcatgcgcaacagcgaaggcgacataacgcgcaccgaactgtattacgaagtcgaaaatgatg |
| | | ccaatgacaccaaccccactctgcacgatctgttccagttggtctccgtcatcctcgccgcctgttctgaaatcaccaaccggcac |
| | | tttaagcgctgggtaaagaatggtggccaggacaactccagcagccagaatacgcctttgggccagtttgttgacgcagccaataa |
| | | cgtagccggcgtggtgcgacatatcttcgatcgcaccaccgataaaaacttgttgattgatcatttctacacttacctgcaaccca |
| | | aaaccgtattcacgatgacgccgatagctgaactcaattacgtgaacaggggagccgagcgcacaattattctggcgttcgagatg |
| | | gatctggtacaagagttgcctgaagccatgctgctgcgtttattaaccggcacgcacaataaagtaattgggcttagcgccaccag |
| | | cggttttagccacaccaaaaacggtaacttcaatcgtcacttcctggcgcactatagccgcgaccttggctaccgggtcgttgaac |
| | | gcgaaaaggcagatatcgatacgcttaaggcattacgcgggttgagggccagtatccgcaacgtagacttcagggtgttcgatgat |
| | | aagcagttaaaattgaccgatatctaccaaaattgtgaaatctatcgcaggacgtatgacaactttttcgacgcgctgaagaaacc |
| | | gctggaatacgacctgaaaaatacctataaacggcgtcagtgccagcgggaactggaagcgttactgcttgccgcctgggagggta |
| | | aaaacagcctgattctgtcactttcagggacgtttaagcgggcctttatcagcgcctggcgcacgcaccagacaacctggcgtcag |
| | | cagtacggtatgcactcccggtgcgatgaaaaaacggataacggtaagaaacatgaccagatcctgacctttaccccattcaaagg |
| | | gcgtcacaccgtccatttggtctttttcgattcaccactggctaatgtcgaagatatcaggcaagaaacctatctccagaacagca |
| | | ataccgtactggtatttatgagcagttataaaagtgcgggtaccggcctcaactactttgttaaataccatgacggcgatattaat |
| | | gatatcaatgcaccacgtctggatgtcgattttgagcgcttagtgctcatcaactcctcgttttacagcgaagtaaaggacaacag |
| | | cggcaacctcaatacattacctaactacgttaccgtgcttaaacactacgccgatgacgatattaccgtccacaagctggccgatt |
| | | tcaacgttaatttcgcccacggcgaaaactatcgcctgttaatggccgaacatgatatgagcttattcaaagtcgtcgtgcaggcc |
| | | gtagggcgagtcgagcgtcgcgacactctattgaaaacagaaatctttttaccccgcgatgtgttccgtaatgttgcatttcagtt |
| | | cgccgctcttagtgaagatagcggtaacgaggtggtatcagaaagtatgtctttgcttaaccaccgactcatggaggagtgcgaaa |
| | | agctgagtcagggccagtcattcaataatgcggaacagcgactgacgtttgagcaagctatcgtcgcgaatggtcgccgcatcgat |
| | | gaaattcacaaacgtgtccttaaaaccgactggattaataaggtacgcgctggcaatctcgattatctcgagatatgtaatttatt |
| | | ccgcgatcctgactcctttaccgatccccagcgctggctggcaaaactccaggctaatcccttgtataccgccaatcgacaaatgc |
| | | aatctgttcacgacgctctgtttatcgatcgtcagcaagggaatcaaacgattttactttgccacaaacgcggcccggatggactt |
| | | gcccacagagattattccgccctgtcggatttcgctggcggcgcaagagagtaccggccagagctcaccctctttccgcagtatag |
| | | aaacgatgtcgattttacccccggcaacctggtcggcgagttgattcgtgaatgtgacaacatccaggaaaaggcattcaaaaaat |
| | | gggtacccaaccccaggctagttccgttgctcaaaggcaatgtcggtgaatatctcttcgataaagtgctaaaaagttatggtgtt |
| | | accccactctccgaccagcaggtgtttgaacgccttgaaccgctggtctatgagttttttgaccgctttattgaagtgggcgacga |
| | | cctgctctgcatcgacgttaagcgctgggcgacacagttggacgatttgacgcgggcagaagaaacgcttgagaaaagcgacaaca |
| | | agattcgccagatccgtaatatcgccagccaaaaggcggatactgaggggcagaaacagctccagacggcgctggcaggccgttat |
| | | gaacgtattcgatttatctatctgaacgtcgcctacagccagaaccctaataatctgatgtggcaggataatgtggatcacacgat |
| | | ccactacctcaacctgttgcaaactgactaccagtattatcagcccaaaaatcgagagagcggacgcgctcaggaaaactcgaaac |
| | | tgcgcatgacattggatataaacccaatgttactaaccctgctgggtgtagaaaagttgccgactaaaggaaaagtatcatgatcc |
| | | ctaatctgaatgagctgacggatactccgattgcccgtaccaatttgatcaagcttgaagaagatcagctgacaacaatccagcgt |
| | | ctattggccccggtatctaatatctatacgatagactttatggttcagcactttactaaagagcgaaaagaaaaatccgctgatta |
| | | ctatgcgcgaattcatcaggaggtaaaaacttgcgtgcggcagaagcttgggcttgaggccggacaggaagtaaaatatgagctgca |
| | | ttgcttacccaattaccatcacgtcttttttttcctggcgcctgctgctgcaccgaacagcctagcgcatcggactttggcagaacg |
| | | cattgaaacgctttgccagcgactcacagctgaaaattatgatttatctcgcctgattcagggattgttcagtctgcatttgaaaat |
| | | ggtaatgctggaacaagccagcgagcgcttttcggtaccgccaacctacttcaactctacgttctatctcaacgctcgcctgagtca |
| | | gcccgtcacgcagaaaagcggcactggagtgatggaggcattcgaactcgacatttatgcatcagaatataacgaactcgcctttac |
| | | cctgcacaaacgaaaatttctggtcgaaccggaggatgaattgcatctctctctggacgatacctgcgtgtggtttaacatcgataa |
| | | tcgtcggctcaaagcccggcgcaaactcgatgcccgggatagcaaactggacttttttcgtgagcgcagcggctatggtgaatgcca |
| | | ggcctatacctataacgtggtcatgaatgccgcctgcgagcggctcagtgaactagagatcccgcatcagcctatcgcatttcaggc |
| | | cacccacgaggtcaatcagttcgctaccgacctcgatcaacaactgactaatacgctgttggtggttaataacggcgtcgaatttag |
| | | cgccacgcaagaagcttatttctttgacacattagccatccagttccccgggtatcaactctggcctctggcgtcgcttaaacattc |
| | | tcagcaaaccggcttttctgagctgcctgccagtacatctattctggtactcaatgcagtagatgaagagcggagcaacagcatccg |
| | | ccagcaagataatgaatctgttgagtacaatgatttctatgcggcctttgccgacgcccgaaaacaacccgaactcaattgggatac |
| | | ttatacccagcttaaactagatcgtttgcaagggtggctaaatcagcaacctctgcccgtagtcttacagggtatgaatattgatca |
| | | caagttgttggatgcgattgattttattaatgaacaattgacaagcaaccctactcaatacgaaatcgatcttacgaagcctcacag |
| | | tcgtctcaagtcagcagttaccttacttaacagtaaggttcgccgaacaaaaaccgagctatggttcaaagagagcttactcaatca |
| | | gcatcacatcccactaccagatttggcggacgggcactataccgcctatgcagtacgcaaaacgaaaagctatctccccctgcttgg |
| | | atatgtcgaactaaaaatagaacacggccaacttagggtggttgataccgggatcgctgaaggtaaattagactatctgtctgttga |
| | | tcccccctctctgggacgattaaagaaattattcgacaaaagcttctatctctacgaccacacagcagatgtcctgcttaccaccta |
| | | caacagctcccgcgtaccgcgcctgattggcccggcgcaatttaatatcgtcgattcatacgcttatcaggaacaagaaaaaactct |
| | | ggcagagcgtaaaggggataaatttaacgggtacgccatcacccgctctgcaaaaccggatcaaaacgtactgccctatctgatatc |
| | | acctggccgctcgaaatacgactcgctgaccaaagcgcaaaagatgaagcatcaccatatttatctgcaaccgcatgagaatggtgt |
| | | atttgttctggtaagcgatgcccagcctacaaatcctactattgcacggcctaacctggtggaaaatctgctgatatgggatgccca |
| | | aggcaaagccgtagatgtatttagccacccgttaactggcgtttatctcaatagctttaccctggatatgctcaggagcggtgaaag |
| | | cagcaagtgttcgatttttgccaagcttgcccggttgatggtagagaactagcggaaaatttagggcggtgtttttagaattcgtta |
| | | tgtgtgaacctaactgatctcccccctgaaaacagtaccagtctaaactgaagtctccggtctttcttcctgctcacagagaggctt |
| | | attaccatgaaaaagacccgttataccgaagaacagattgcgtttgcgctgaaacaggccgaaaccggcacccgcgtcggggaagtc |
| | | tgcagaaagatgggtatttc (SEQ ID NO: 62) |
| 66 | pLG068 | caactgaggcggatatggccggtgcgttcatgtcctgaattaattcgaaagacaaatcgcgttaccaagcgttgcgcgatttagca |
| | | gcaaattgatagcttagccaccaacatttacacgttgtaggttgtcttggccgccattggtcttcagcaacctgcaacgctgatca |
| | | gtcgctcagggaagatgaggtaccgcagatggacaagcacgcccccgagcacctgctccgccttctagcccaaggcgcctcgctgt |
| | | gtggcaccgacagggccgaagcgtttaccgtgcttcaaagagcatccgcattgctctggcgcctggagcctagcgctccccccatg |
| | | tcagcgatcaagcttgaaaatcagcttagcctacccttggaaaagtggttgccggatgcactgaggctagattattcgggcccact |
| | | gctttactccaacatcgcgacgcagacctgcaacgaaatgctgcttgagctcgacgtcagtcagctctgggaagaagtccaggcaa |
| | | gcgtaaatagggtcaagcaggcgtgtcggctgcgggcagagggagaaattcactaccgcaacttcaggcttttcctcattgagcac |
| | | ggcgtgatctttccgtctgaagcccaagatgtcttcatcccgctcaacctctccctgaacgagttctacgaccccatccccctcca |
| | | tctgtatcacaacggcttagtctacttgtgcccggaatgccggtggccaatgaatgcccagcggcacgaagtcagctgcgactcag |
| | | cctggtgccaagacaaaaaaagcctttttgttcgtgaaggtacaagccttctcaaccgtgtgaacaacagcgtgctgcatggccag |
| | | ccggtcgatggccgtctgatgctcaaacctgcgctgtggaaattcaccctgcagccaggacttatcgaaatcgccctggcgagtac |
| | | gctggcgggaaaagggtttgatgtgagtctctggccggatgtggatcgaacagacctccgtatccagttaggccttattgagcagg |
| | | acatcgatgccaaggtttgggtgtccccttacgagttggccaaacacatcgaatcgatcccctccagcaaaccacgttggatcgtg |
| | | attcctgactatcagcgggagagcattccgtttctacgccagcgctgcaagtctggggtgagtgtatttacccaaagccagtgtgt |
| | | gaaggaggccctgaaacatgctccccctttctgataccagcgtcatactgttcctcgccttagccgcgcgttacgtcggcaacgaa |
| | | cccatggtggcggacgcagcagcgctctgcgcgggtcgcacacgaggctggagcacttggtacgtgctatccgagcctgaccagct |
| | | acttatcgctgaaggcttgcgcctacgcccatcctccgtggcgcagcccaaacgcttcgtgatgaccgcagaggaaattatcaagg |
| | | gcgaacgtagcccctttgagttagtcgactctggcaagctcagcagtgagctccacgagcaggattgctatcgcgtttcaccccac |
| | | ctgaacgtcgatcagctcatcagggagcacctagatgcgttgagatatgggcgccccccatcggttcatgcacagattccagactc |
| | | aggggatgtcgttctcaagcacatcacaggtgatcaggtcagggtgttcgtcgtcccacagagcgagcgaggggtgctcagtggcg |
| | | cccaccagtacgttactgtcccaacctcccatgcagcccctgagacgaagtgggaacttgacgctctgaacgagctcgcggagtca |
| | | ctcgatggtgcaaccggattgcacacgaatcatcgaagctcgttggccaacatttggggttcggatccgctacgcacagctgacgc |
| | | aggtcatttttatcgtgtgaacgcgccgactggcaccggtaaaagtgtggctatggtcatgatgtcgatcgatgctgctcgcagag |
| | | gacaccgggtggtgatcgcggtgccaacgttggttgagcttgagaacacggttcggattctcaagcaatccgctgcggtgacagcg |
| | | cctgatatcacggttgcccccctgcactcagcaacacgcgtatacgagcgcggaaagcttcaatttcagcagggtcattctgcacc |
| | | ggcctacgactatgcctgcttactcgatgcctatgcctcggatacgctgcaagttgaacctggaaaagaaccgtgctttaacgttc |
| | | gggtatcgacacaggaagaaggtcgtgcagaacaatcaaagcggctgaatcactgccctttcctgttcaagtgcggacgaacaacg |
| | | atgctgtcgcaagctctggaagcggacgtcgtggtgattaaccatcacgccctgttgtccggaacaacccgcattccattgtccga |
| | | ctcagaccggtgtccaggcccacgcagcttcatagagctgctgctaagaacagcaccggtgtttcttgtcgacgaaatcgacggtc |
| | | tactgaagtctgcgatcgacagcagcgtcatcgaattgaagctgggcaatcaaggtgacaacagcccgctgctccgtctattcaat |
| | | acagtggccggtcgatccagcattcctgagattgatcgaagcagcatgtaccgcgtgaactgggcgcttacctactgcacgctgag |
| | | tgtcagccagctaatgaacctccagcaagaggaatatttcgagtggccaaagaaagaaaccacttggtcggacgcagacgacacgt |
| | | tcattaccgaaaagcttggtattgatcgtgagacgcttgagcacttgttcaacagcacgaaccgcataccgggctatctggaaaag |
| | | ctgagtcaccaccttgctcactggcaatcaaatgggggccagtacaagcttgaggccttggcaatcaatctgggccatctcgtcaa |
| | | agagttgtccgacagcgacttgcttcctgcgcgtctcaaggagcacgatcaaatccgcctcaaggcgtcactcatcttgcgaggca |
| | | cgttagaagcgatcgaaacgcacctgcgcaaccttcaggtcgagctacccagcttcgtgaacgccgaaataccttatgcctacgag |
| | | gtcaaacggagtatcgcagggccggagccgctgagcccgactccgaatggccccttgcagcgagccgtatttggcttcaaacgtaa |
| | | agacaccggagacaacgactcaactctgaacgttgtcgcaatgcgtggggatccgcacagcacactgctttcgctgccagatgtca |
| | | gcgccttgggctatgccggtgtaaagcgattgtttatcggcttctcggcgactgcctacttccccggcgctagcgcttacgatctt |
| | | cgtgctaaggatttcatcgacgttcccgatgtagctggccaggtgactttcgaaaatgtgcctcagacaaccgctatctctggcgc |
| | | tcagttctcgcagcgaaaattcctggtatcaaaattcgccaaagagatttggccgtggctacgcagccgacttgcaagcttggcca |
| | | acgaccccgtcacgcagacgcgtgcccgcctgctgctggtcaccaatagcgatgcagacgctgaagttctggccatgaccctggcc |
| | | aggatgcagggcggtcctggtcagctggtaggctgggttcgtggacggcaaagcgactacaagccgtcctcgctagatgcacagca |
| | | gatgcttgcatacgatgatctcgctgagttcaccaacggccgacacaaggacaaaactctgctggtcagcgccttgggcccaatgg |
| | | cgcgtggacacaacattgtgaacagcgacggattttcagccattggtgctgtggtgatctgtgtacgccctcttccatcgtcagat |
| | | agccccaacaacaatctggcgcacatctgttacgaaaccagcaagtttgtagcgccatccagcagtccgggcgtattgatgatgca |
| | | ggaacggaagcattccaatgcgctgctgcaaaagattcgtaccgcccgccccgcgttcagccagcagccggccaacatccgccact |
| | | acacgatcatgaacatccttgtgagcctcacccaactgatcggtcgtggacgccggggcggcacacctgtgacttgctacttcgcc |
| | | gatgcggcatttctcgaaggtttgaagccgtggcctctgatgcttaacgagagcgttgaacagctcaagcaagacggcgattggaa |
| | | ccagtttgcccgtcatcatgccggcgttgcatcggcacttttgaaatacatcaatggatcagtgaaggacgcacgatgaaggttct |
| | | tgaattacgcaccagcctctttgagttcgatccagcagctttgggacaaagctaccgcgtcgtggtaggcccgcattaccttgatg |
| | | cctggcaagctcttcagggactggtaaggaaaccccatcctggcctaccgaccatagggcttgaggaaatgctcgccaccctctct |
| | | ggagggccggtcaaggtgaacctgtttccgcaaaaagaaggaggcgtctcggcgatccttttgctgaagcccctgcccgttgacac |
| | | catcaacgaagcgctccgcctttgggctatggacgtgatgcagttttacaaacaagaactgctcgaattcgaaggcaaactggtcg |
| | | tcaccgacctggtacctatggacactgcccgcttggtcgcgtccggtgacgtatcgtcccttgcgtacacagtcattccttggttg |
| | | gtaggtcaagcgctgattgcgaagccaatgcaagcagcgaaacctcttaagctttatcaggctgccgacgggtgcgtgctcgcctg |
| | | ggacgacccagtcgtttcggaaagcgacgtacgctacgccagtgcgcttcacgccatcgagcctgcattggtgctgatctacggcc |
| | | aatccaagccctatctacagctgcgggtaaagctgactcaggtgatgccgaatctcaagggtcaaaagaagcatgcctgggtcaaa |
| | | actggcgacctgattgtcaaagcaaaaatccggagcaagcccgacgggcatgggggctgggaaacattttacgaacatcccattga |
| | | aaagttgctgacctttatgggggttccgtcgtttcctccaataatcgagggcgatatccctgtcgacagcgacgtgcgccctatct |
| | | acgccattccaccctcgaaccccttgatcgcgtcaggcactggccccctgtttcttgaccaggcaggattccatctgcttgcttgt |
| | | ctaccaaggacaaagccgcttctggtcagaaaatctgtcgctgttctgcgcgaagaaaagaccaatgctacgggcgaggtgatcga |
| | | cttgaacgtgatggtcttggcagctcacgcagacgtgatgctaaggcttcacggggcgagttcaaacttggccagggacagcaagt |
| | | tcttcaagaaagtcgccccaccacgtgtgacgctgtcacgtctggatgtgccagatgcgcagcgtatgctggaggggcagcatgac |
| | | ctgaacagcctcaacgaatggttattgaatcacgtggttccggcgagcagagtgctcgctcaaaacggcgccaaggtcatgattgt |
| | | tgagaccagtgcatcagcagcatcacgcgaaactggactcgatcccaagcacgtcatccgccgggtgctggcgaagcatggcatcg |
| | | ctacccaattcattatgcacgttgaccccgatgcacaggtgaagaagcgcaagcctaaggaagatgaccgtgatttcaaagcgatc |
| | | aactcgatcatcgaagcgattcggttgagcggccagcaccctgcccctacacccaaggtcaagtcgatgccggccaacactacggt |
| | | agtttcagtcctgctagatcgactccaggacaaaggctgggcgaaatttctacccgtgatcacgcgcaccacgctcggtggccaca |
| | | cccctgaaatcttctggtttgagtctggcgcagagtctgcaggcaaatggttcagctacagcgcgggactgactgcgatccatgcc |
| | | acggacacgctgctgacgcctgatcaattgaaaacactgatcacccaagcccttcttgattgcaaaatcaatccagctgactcgtt |
| | | gatcgtctgcctcgatgcagacctgagaactttttatgcaggcctaaaagacagtcctggtgaggggctaccaaccgtaccggacg |
| | | atgcagcagtagtgcgaatccgtgcggaccatcaggtagcacagatcagtggtagccacaccttgtcgccgcaagcagcccactac |
| | | attggcacgaaggtcggcgcgttccagtcctgtgagagtccctcagtgttttactttgtgtctccatccaagcagtttggcagcgt |
| | | tcgttcgcagcgtgacaacacccgttacgacgtacgggagagagatcttcgggatccttggcaacagctcggcgtcacggaaattg |
| | | ccatcatccagcctggagcctttgacggtgcagctgcggttgccgagcaagtggcgttgctctgtcgcaacccaccactgtgggat |
| | | ggtcatctgcgcctgcctggcccgatgcaccttggcaagcaagtagctgcagatcatccagttatggaagcgcggcgaaagacaga |
| | | ggctaatcgatcagccggttaaagccgcctggtaaccgttcattactagacacgtataagtcataacacccagcatttcacaaaga |
| | | gcgcga (SEQ ID NO: 63) |
| 67 | pLG069 | atttgcctgagacttatttcccgtggcgcttagctagctaagagtgggcatcgtgagcaccattgatgatatgaaatgacggtata |
| | | gcaatttaaccgtctggatttcaccagaaattagtgattcaataggaaattaaatacgttttatatttcaatgtgtatcaaaatca |
| | | ttcctgaaatttcctggtgctatatttgatgaaaacggataaacattctgttgattttaataaaattctgtctttcgatttagagc |
| | | ttacgcgtgatgaaaagttaaggcatatgggggccgtgctggcggaacgcacgttgagtttgaagataaatcaggatgaagcgatt |
| | | catcaattggatgaaatggcaggcgatgcagatttaatcctcggtcataacatactggatcatgatttaccctggattgccaaaca |
| | | acgcgtacgtgctcaaatattattagataaaccaatcattgataccctttatttatcaccgctagcttttcccgcaaatccatacc |
| | | atcggctgattaaagactataaactggtaagagatagcattaacgatccagtgaatgacgctaaattatcgcttcaggtattcacc |
| | | gagcaaatatgtgcgctgcaagaaaagccgctggctcagttgcagctatatcagtatctttttgagcacggcgttgccagccattt |
| | | cagtacacgtgggatggccagcattttttccgcactgacgggtcaggcgtccatatccgccgtagttttacctacgctagttaaat |
| | | cggttgctcagaataaagcatgccctaaccagcttaatcgggttattggcgatgctcttaaacagcctttgcgcttactaccattg |
| | | gcttttgcctgtgcctggctccccgtatcgggagggaattctgttttaccgccctggatatggcgccgttttcccgtcaccgctga |
| | | tatcatccgcgaactgcgtgagcaaaaatgccagtctgaaacttgccgctactgctgtgaaaaccatgatgctcgtcggcatttac |
| | | agaaaattttcgagctgaacgattttcgtaaacttcctgatggctcgccgttacagcgcaatatcgttgagtacggattagctagt |
| | | cgttcactgcttgggatattaccgactagcggagggaagtctttatgttatcaacttcctgcgattgtcaggaatctgcgaaatgg |
| | | ttctttaaccattgttatttcgcctttacaagcgctgatgaaagatcaagtggataatttacgtcataaggcaggtattaaaggcg |
| | | ttgaggccatttcagggatgctaactttacctgagcgcggcgctattcttgagcaggtccgtaagggggatattgcgattctttac |
| | | ctctctcctgagcaattacgtaaccgcgcggtaaaacaagctatcaagcaacgtcagattagtggatgggtttttgatgaggctca |
| | | ctgtttatcaaagtggggccatgattttcgtcctgactatctgtattgtggcaaggttattgaatctttggcgcaggagcagtctg |
| | | tgcagattcctccggtattttgctataccgcaacggcgaagttggatgtgattaatgatatttgtcggtattttgacaaaaaatta |
| | | tcgcacccattagctcgtttttcagggggagtagaaagaattaatcttcactatgaaatcattgcaagtaatggcttgagcaaaat |
| | | tagtcagattttgaatttgctcgataaatttttttctaatgatgatgaaggtgcatgcattatctattgcgcgacccgccgttcgg |
| | | tagatgaaatcagcgatgtgttgacccaacagcaacctttaccggttgctcgtttttatgcccggcttgaaaatagtgaaaagaaa |
| | | gaaatccttgaagggtttattgctaaccgttatcgagttatttgtgctactaatgcctttggcatgggaatagacaaagaaaatgt |
| | | acgtttagtaatacatgcggagatccccggttctctggaaaattatctccaggaggcagggcgtgctgggcgggatacgctggacg |
| | | cgcattgtgtgctattatttgatgagcaggacattgaaaaacagtttcgccttcaggctattagtgaagtaagctttaaagatatt |
| | | tatgcaatatttaagggaatcaaaaagaaagttaatgaaaataatgaagtcgttgccacaagtattgagctaattaatcatcctat |
| | | ggttaaaaccagtttctctatcgatgataacaatgcggatactaaagttaaaacggggatagcgtggctggaacgtgttggttatg |
| | | tggagcgacttgataatataactcaggtttttcagggaaaagtggcctttccttctctggaagaagcgcaaagtaagatggcagcg |
| | | ctgcacttgaatcctgcggcgatggttctctggaatgctgttttacaggcgctattaaatgctaatgacgatgacggacttagtgc |
| | | cgacagcattgctgatgaggttgcccaatttcttccgcataaagaaaataatacgtcaggaattgaagcaaaagatgttatgcgcg |
| | | tattgacacagatggctgatgttggcctggtcaccaggggaatgctgctgaccgtacgtatgcgccccaaagggaaagataatgcg |
| | | aggatcacaactgagttaattcacaatattgaaatcgccatgttagggctgctgcgcgaagctcatcctgatattgaactggggat |
| | | gccatggcctctccagattgcggttatgaatcaagagattattcagcaaggctatgatagaagtaataccacgttactacaaaata |
| | | tattatttagctggtctcaggatgctcgagcaaacggtcataaagggcttattgattttcgttatggtacaaggaacagctaccag |
| | | attattatgtatcgtgactgggcatatatcgaaagagccattttacaacgtcatcgtgtgacaagctccgtactgaattttattta |
| | | tcaattggcattggatagtgatgaaagcagtatcaaaaaagtgatgctttctttctcactggaacaggttatcgattatttaagaa |
| | | aagatgttgatattattccaatgatccaacagagacaggggggggatgagcagcagtggctgatggctggtgcagaacgtgctcta |
| | | ctttatcttcatgaacaacatgccattgtgctgcaaaatgggctggctgttttccggacagcgatgagcttgaaattgcaggctga |
| | | aaaatcgcaacggtatgtcaaagctgattatgaaccactggctctccattatcagcaaaagacgcttcagatccatgtgatgaatg |
| | | aatacgccaggcttggtcttgaaaaacctaactatgcccaacggctcgtacaggattactttgctatggatgccgagtcatttgtt |
| | | ccactttattttaaagggcggcgaaaaattctcgatctggcaaccagcgaaagctcatggaaacgcattgttgaaaatttgcataa |
| | | tcccgatcaggagcaaattgtgcaggcgagccttgaacaaaatacgttagttcttgccggaccaggctcagggaaaagtaaagtta |
| | | ttatccatcgatgcgcctatcttttacgcgtgaagcaggtcgacccgcgtaaaatcctgttgctctgctataaccgtaacgcagcg |
| | | atttccttaagacgcagattgaagtcgttgcttggtaaagatggcgccagcataatggtacaaaccttccacggattagcattgag |
| | | ccttacgggataccagattgagcggaaagataatgacgaaatcgattttgataacctgctctggaaagcaatagctttactcaaag |
| | | gcgatgaaacgcagctcgggttagaagttgaagaacaacgtgaatacctcctcggcgggcttgagtatttactagtggatgaatat |
| | | caggatattgatgagccacagtatcagctgattgccgcgctggcaggtaaaaatgaaagtgaagatgatgctcgtcttaatctcat |
| | | ggcggtgggtgatgacgatcaatctatttatggtttccgtgatgccagcgtgcgatttattcgtttgtttgaaagcgattactccg |
| | | cccgtactcattttttaacgtggaattaccgctctacggccaatattattgcatgttcaaattatcttatcagtcataatcagggg |
| | | agaatgaaatgcgagcatccgatcgtaatcgatcgcgctcgccagatgcttccgccaggcggagagtggagcgcacttgaaccttc |
| | | ggaaggcaaagttgttatccagcattgtaccggcgcggctcagcaggcggcagaagtcgtgcgccaaattcagtatattcaacggc |
| | | tgcagccggaatgccctcttgagaaaattgcggttattgcacgcaatgggctcgacaaaaaggagcttatttgggtccgttcagcc |
| | | cttgcggatgcaggtattccttgccgctttgcgctggagaaagattatggtttccccattcgccactgtcgggagatcgccaatta |
| | | tctgctatggctacgagaaagagcgctcgagtcgctgacgccagcagagctgtgtcagcaactaccggggcgagaccaggcgaacc |
| | | gttggcacgatattatttatgaattaattgagcaatgggagctaagccagggaggcgagccattacctgccgcttattttgaacat |
| | | ttcatactggaatatttacatgcccagcacagccaggttcgctttggcctgggggttttgctgagcaccgtacatggcgtaaaagg |
| | | tgaagagtttgagcatgtcattatattagatggaggttggcgtagttcgcactctctgcaacctgaaaataacgaagaagaacgaa |
| | | ggctcttttatgttggcatgacgcgagcgatatcccgacttgttattatgcatgatgatcgtgcgccaaatccctatatcgaacag |
| | | ttagatccagcggtcatcagccatactgctgcacaagccgttgcgcctgggatcttacgtcgtttctcgatcatcggattgcgcca |
| | | gctctatatcagttttgcaggtggacatccggctggtcatcccattcattcgttacttaccgatatgcaggttggggatagcgtcca |
| | | actggtctctgtcgggaataccatcaaggtgaatgctaatcaatcggcaattgcgcagctttcaagtgccggaaagagccagtggca |
| | | attttctctttccgggatccgcaaaattgaagtgcttgccatgctacagcgcagcaaaacactaacagcagaggattatcaagttgc |
| | | ggtgaaagtggacaattggtatgtaccgatattattggttgaaacccgtgaagaagccgcttatgacaatattacttgaagcagaat |
| | | ac (SEQ ID NO: 64) |
| 68 | pLG070 | tagctattgtgactatgctaaccatatgaatctattgtgtgattatgagtaatgactttttctaatatttgatttttaatgtagta |
| | | acttagctaattttaaaatttgtaaaaggatgtttatgtcgatttatcaaggtggtaacaagttaaatgaggatgattttcgttct |
| | | cacgtttattccttgtgtcaattagataatgttggcgttctgttaggtgctggtgcttctgtcggttgtggtgggaaaacgatgaa |
| | | agatgtatggaaatcgtttaagcaaaactaccctgagcttttgggagcacttattgataaatatcttctggtttcgcaaattgatt |
| | | ctgataacaatttggtcaatgttgaacttttgatagatgaagcaactaaatttctttctgtagctaaaactagacgatgtgaagat |
| | | gaagaggaggaattcaggaaaatattaagttcattatataaagaggttacgaaggctgcattattaacaggagaacagtttagaga |
| | | gaaaaatcagggtaaaaaagatgcgtttaaatatcacaaagagttaatttcaaaattaatttcaaatagacagcccggtcagtcgg |
| | | ctccggcaatttttacaacaaattatgatttggccttagagtgggctgcagaagatttaggaatacagttgtttaatggtttttct |
| | | gggctacatacacggcagttttatccccagaattttgatttggctttcagaaatgtaaatgcgaagggcgaagcaagattcggaca |
| | | ttatcatgcgtatctctataaattacatggctcacttacgtggtatcaaaatgatagcttgactgttaacgaagttagtgcatctc |
| | | aagcatatgatgaatatattaatgacataatcaataaagatgacttttatcgcggtcaacatttgatttatccaggggcgaataaa |
| | | tatagccatacaatcggcttcgtttatggagagatgtttagacgttttggggagtttatttcgaaacctcaaacagcgttgttcat |
| | | aaatgggtttggtttcggtgattatcatataaatagaataatattaggcgcgttactgaatccatctttccatgttgttatatatt |
| | | atcctgaattgaaagaagcaattaccaaagtaagtaagggtggtggttcggaagctgagaaagctattgttactttaaaaaatatg |
| | | gctttcaatcaagtaactgtagttgggggaggaagcaaggcatattttaatagtttcgtagaacatctaccataccctgtgctctt |
| | | tccacgagataatattgttgatgagttggttgaagcaattgctaatctttctaaaggagaaggtaatgtccctttttaaacttact |
| | | gaaatctcggctattggatacgttgtaggattagaaggggaaagaattaggataaacctgcatgaggggttgcaaggcagattagc |
| | | atcgcatagaaagggggtgagctcagtaacgcaaccaggagatcttattgggttcgatgcaggtaatatattagttgtcgcaagag |
| | | tgacagatatggcatttgttgaagcggataaagcgcataaggcaaatgtaggcacatctgatttagctgatatacctctaagacaa |
| | | attatcgcctatgcaattggctttgtgaaaagggagttaaatggttatgtttttatatcagaagattggcgcttacctgcattggg |
| | | ttcttctgctgttcctttgacttcagattttttgaacatcatttatagtattgataaagaagaactcccaaaagcggttgaattag |
| | | gtgtggattctagaactaaaaccgttaagatatttgcaagtgttgataaattattgtcgcgacacttagccgttcttggtagtaca |
| | | ggatatggtaaatcaaatttcaatgctttgttaacgaggaaggtttctgaaaaataccctaactcaagaatagttatttttgacat |
| | | aaatggtgaatacgcgcaagcttttacaggtattccaaatgtaaagcacactattctaggggaatccccaaatgttgatagtttgg |
| | | aaaaaaagcagcaaaagggtgagctatatagtgaagagtattattgttataaaaagataccatatcaggcattaggttttgctggg |
| | | ttaattaaattattaagaccaagtgataaaacacaattgcccgcattaagaaatgcattaagtgcaattaatcggactcattttaa |
| | | aagccgtaatatttacttggaaaaagatgatggtgaaacttttcttttgtatgatgattgtcgtgacacaaatcaaagtaaattgg |
| | | ctgagtggttggatttattaaggcgtagacgtcttaaaagaacgaatgtatggccaccgtttaaaagtttagcgactttggttgct |
| | | gaatttggatgtgtagctgctgaccgttctaatggaagtaaacgtgacgcgtttggttttagtaacgtgttgccattggtaaaaat |
| | | catacaacaacttgcagaggatataagatttaaatctattgttaatttaaatggagggggtgagctagcagatggtggaacgcatt |
| | | gggataaagctatgagtgatgaagttgattacttctttggtaaggaaaaaggacaagaaaatgattggaatgttcatatagttaat |
| | | atgaaaaatttggcacaagatcatgctccaatgttacttagtgcattgttggagatgtttgctgagatactatttagacgtgggca |
| | | ggaacgttcgtatcctacggtacttttgttggaagaagcgcatcattacctgcgtgacccttatgctgaaattgactcacagatta |
| | | aagcatatgaacgacttgctaaagaaggtaggaaattcaaatgctctttaattgtcagtactcagcgaccctcagagctttctcct |
| | | actgttttggcaatgtgttcaaactggttttcgttacgtttgactaatgaaagagatttacaggctctcagatatgcaatggaaag |
| | | cggtaatgaacaaatcttaaaacaaatatcaggtttaccaagaggtgatgctgttgcatttggttctgcatttaatttgcctgtaa |
| | | gaatttcaattaatcaagcaaggccagggccaaaatcttcagatgctgttttttctgaagaatgggctaattgtacagaattacgt |
| | | tgttaattacctgatgtacatggctagtgcaagttggtagcgcatgtctatatgcatttatttgcatgtgttttattgagtgagcg |
| | | cacaagcttgatgacccgacaggtatgtatttagactgaa (SEQ ID NO: 65) |
| 69 | pLG071 | gtgcgccttatgtgattacaacgaaaataaaaaccatcacaccccatttaatatcagggaaccggacataaccccatgagtgcaat |
| | | agaaaatttcgacgcccatacgcccatgatgcagcagtattgaaaaatataacatatccaactgattgtattgaaaatttaaaata |
| | | gccatataacaaaaggttacacataagctactttttggggtttcaggcaagaaactaaaaattattaacgccatcaaattattcac |
| | | atcttaataattagcattgaaatttaatgtttttggttctttgtacatgtcaatggcttgtctttgtggcagaatcataaagctat |
| | | gcaatcattgcattgttattaacacagcatatttttatatacttttaacaccttacctcaaaaaggataacaaagtggacagaagt |
| | | gcggttgatacaattcgtgggtattgttatcaggttgataaaacgattattgagattttttcgttaccacaaatggatgactcgat |
| | | tgatatagagtgcattgaagatgttgatgtctacaacgatgggcatttaactgcgatacaatgcaaatattatgaaagtaccgatt |
| | | ataaccactccgttatatcaaagcccataagattaatgttgtcacactttaaggacaataaagaaaaaggggctaattattatctt |
| | | tatgggcattataaatccggtcaagaaaagttaacactcccattaaaagttgactttttcaaatctaatttcctcacctacaccga |
| | | aaaaaaaatcaaacatgaataccatattgaaaatgggcttaccgaagaggatctacaagcctttttggatcggttagttataaata |
| | | tcaatgcaaaatcatttgatgatcaaaaaaaagaaactatacaaataataaaaaaccatttccaatgtgaagattatgaggcagag |
| | | cattatctttattctaatgctttcagaaaaacatatgatatctcttgtaataaaaaagatagaaggataaaaaaatctgattttgt |
| | | tgaaagtatcaacaaatcaaaagtcttatttaacatatggttttatcaatatgaaggaagaaaagaatatttaagaaaattaaaag |
| | | aatctttcatacgcagaagtgtaaacacctcaccttatgctcgttttttcatcttagaatttcaagacaaaactgatataaaaaca |
| | | gttaaagactgtatatataaaatacaatcaaattggtctaatttatctaaaagaacagatcgaccatattctccttttttactttt |
| | | tcatggcaccagcgatgccaatttatacgaattaaagaatcaattattcaatgaagatctaattttcactgatgggtaccctttta |
| | | aaggaagtgtatttacccccaagatgttaatcgaaggtttttcaaataaagaaatccacttccaatttatcaacgacatagatgat |
| | | ttcaatgaaacactgaacagtattaatataagaaaagaagtttaccagttttatacggaaaactgccttgatatcccatcccaact |
| | | accccaggtaaacatacaagttaaagactttgccgacataaaggagatagtgtaatgagcaggaataatgatattaatgcagaagt |
| | | agtatcggtatcgccaaataaattaaaaatttccgtagacgatcttgaagaatttaagatagcagaagaaaaattaggtgtaggat |
| | | cttatttaagggtttcagataatcaagatgttgctcttctggcgatcatagataatttttctattgaagttaaagaaagccaaaag |
| | | cagaaatacatgatagaagcaagtccaataggtcttgttaaaaatggaaaattctatcgcggtggagattcacttgcacttcctcc |
| | | taaaaaagtggaaccagcgaaattagacgaaataatatccatatactcagatagtatagatataaatgaccgttttactttttcaa |
| | | gcttatcgcttaataccaaagtatccgtacctgtgaatgggaatagatttttcaataaacatatcgctatcgtaggttcaacgggt |
| | | tcaggtaaatcccacactgttgcaaaaatacttcaaaaagccgtagatgaaaagcaagaaggttataagggattaaacaattctca |
| | | tataattatttttgatatacattctgaatatgaaaatgcattccctaattcaaatgtattaaatgtagatacattaacccttccat |
| | | attggctattaaatggtgacgagttagaagagctttttcttgacacggaagcaaatgatcacaatcaaagaaatgtgttccgtcag |
| | | gcaataacattaaataaaaagatacattttcaaggagatccagccacaaaggaaataataagctttcactcgccatattatttcga |
| | | cattaatgaagtcatcaattatattaacaatagaaataatgaaagaaaaaataaagataatgaacatatttggtcagatgaggaag |
| | | gaaatttcaagtttgacaatgaaaatgctcataggttattcaaagagaatgtaactcctgatggaagttcagccggtgctttaaat |
| | | ggaaaacttctcaattttgttgatcgattacaaagtaaaatatttgataagagattagattttattctgggtgaaggtagcaaatc |
| | | cgtaacatttaaagaaacattagaaactttaataagctatggaaaagataaatcaaacataacaatacttgatgtaagcggtgttc |
| | | cttttgaagtacttagcatatgtgtatcattgatatctcgattaatttttgaatttggctatcattcaaaaaaaataaaaagaaaa |
| | | tctaatgaaaaccaagatatcccaatattaattgtttacgaagaagcacataaatatgctcccaaaagtgatctgagcaaatacag |
| | | gacatccaaagaagcaattgagaggattgcaaaagagggtagaaaatacggagtaacccttctccttgcaagtcagagaccttctg |
| | | aaatttcagaaacaatattttctcagtgtaatacttttatctcaatgcgattaactaacccagacgatcaaaattatgttaagcga |
| | | ttactcccggatacagtaggtgatattacaaacctcctaccatcgctcaaagaaggtgaggccttaatcatgggggattcaatatc |
| | | aataccttcgattgtaaaaatagaaaaatgtacaatacccccatcgtcaattgacatcaaatatcttgatgaatggagaaaagaat |
| | | gggtagattcggagtttgataagataattgaacaatggagtaaaagttaatttcagaagtggattcactcttgctcaagagtgaat |
| | | ccactaatatcatatcctaatgatatagtttaataaaatctattctggaatcattaggctgagag (SEQ ID NO: 66) |
| 70 | pLG072 | ccattttttaaaataccctcttaaaggagggtattttaaaattatttgttttaataaaaattaaatattatattcattatcacaac |
| | | caataaaccgtttattttttacacttgcatactataaagacatgaaagatcccccttgtcaggactacgctaaagataataataac |
| | | gtctattttcgtcatatataatatttgcttgttgcatttctaaaaaaaaagagtaaaatatcaaaatttaggagttacttttggac |
| | | ttatatgaaggcaattgacttatttgcgggggctggagggtttagtttatccgcccacaatacaggcgctatagatgttgttgctg |
| | | ctatagaattcgatagcgcggctgcaaacacctacagaaaaaatatgttagaaaggcttgagcataagaccgaacttttacaggaa |
| | | gatattttactcgtaggcccaaaaaagttaagaaaaaaaataaagctcaagaaaggcgagcttgatatgatacttggtggacctcc |
| | | gtgccaaggtttttccagtcatcgaattaatgatgctggtgttgatgatcctagaaataaattacttttaaggtatttcgattttg |
| | | tttgtgaatttaaaccaaaagcttttttggtagaaaatgtctccggtttgttatggaagagacatgaagcccatttgaaacgcttt |
| | | aagtttttggcttccaaaaatggttatactttaattcattgcgatgtattaaatgctcgtgattatggtgttccgcaaaatcgcaa |
| | | acgagttttcattgcaggtgtcagaaatgacattttaaaaaaaagaaataatattgagtttccacctcaagctactcatttcaacc |
| | | ctaattctaatgaagtaaaaaacaattcaaaaaatacgtggagaaccgcatcctctgtttttgagaagatgaatgataacttaatt |
| | | caaagatatatatctgaatactttcttaaacatacttcttactcaattgatgaagcacaagagctacttgaaaacctagaatatca |
| | | agacgcacccataagcgaaaaagatccatgcaacatacatatgataccaactgagcgtatggaagagcgtttcagagccacaaaac |
| | | tcaatggcagtagaagcgatgcaggaaaagaatttgagctaaaatgtcattccaatggatacgcaggccataaagatgtttatggc |
| | | cgcataatgattcacctcccagccaatacaattacaactgggtgtaacaatccatctaagggaagattcattcatccatgggaaaa |
| | | tcacggcatcactttaaggcatgcggcaaggttgcaaacgttccctgatgactatattttttggggtaatgcgacagagcaagcaa |
| | | gacagattggtaatgcagttccccctatgttaggcacaatattaataaatgcattacttaacataattgcacccaatagataaggt |
| | | gtaatgtatgaaaaatatcaaaattagaaacttaaatggaccaaaaaatcatttgatgattacttaccttataataatagaaggtg |
| | | aaaaatggtaatttcagcagcttttcaaacaagagcaaggacaattgatcatctagggcgtgagcaaatagctgattgtccaaccg |
| | | caatttccgagctttggaaaaatgcatatgatgcttatgctcgtaatgtttctctaaatatatttgacggcaatacacctgtggca |
| | | actttagttgatgatgggcatggcatgtcgttagatgacattatcaataagtggcttacagtaggaaccgaatccaaggctacaaa |
| | | aaaagatattccatatgaagatagaaacggaatagatcatattcgagcaaagcaaggtcagaaaggcatcggtcgtctttcttgtg |
| | | cggccttgggctcattaatgcttttagtttccaaaaagaaagatagccctcttgtagcttgcctgctcgattggcgtatatttgaa |
| | | aacccatatttgatgcttaatgatataaagatacccattatggaatgcagtgataacaatgaattaatcactgttataccggaaat |
| | | gtttgatgctttgatgggaaatctatggggtgatggtgatgatatattacgagataaccgtattgaacaagcttgggaaaattatt |
| | | ctgaattagaaagaaatgaaaataattatattacaaaagaagctatcgagaatactgtaattaatgctttttttgaggaaaggcat |
| | | tttcaatcttggcctgtgtggaataataaaaccactcacggcacagccatgtttatagctggaattcatgacgatttaatagctca |
| | | gctatcaacagatgctggttcagaagctcaaggtgcagaggttcgggctaaagaacgctttcttcaaacattaaatagctttgtta |
| | | atccatttaaaagagaaggcgaagaacagattactgatttcaatacaagtgttgtcgcatggaatggtaatctgcaacgatttatc |
| | | atcgatgaagttagaaactttgatatttcaaactttgaccagctagaacatatagttgaaggaagtattgatgaaagtggattatt |
| | | ttccgggaaagtgaaagccttcggagaatggtttgataatattacagtcaaacctaaatctgcatataagaccagaaaagatactc |
| | | gctttggccctttctttttaagattaggcacatttgaagttataagaaaaaatagtacattatcagatgaacagcatgcaaccttc |
| | | gaccgtatccgtgatcagtttggtggagtaatggtttttcgtgatgatttacgtgttatgccatacggacgtgaagataatgactt |
| | | ttttgaaatcgaaaaaagacgttcaaaaaatgctggtttatatatgttcagtaatagggcatgttttggtggtgtatgtataacga |
| | | aagaacataaccccaacctacgagataaagcaggtagagaaggtataattgacaataaagcatctaagttatttagagagatagtc |
| | | gaaaacattttaatagaaattgcaaaaaggtttattggccgcgcatcaaatatacgagatgaaaagctagaggaaataaatgctaa |
| | | acatgctgctttgaaagcagacgaagatagaaaaaaattattacgtaaagagcaaagaagaatcaaaacatcgattcaaagagatc |
| | | gtatttctttagaacatttaagaaatgaattttatgaaatatcacagcttctaagcgacaagaataattttaaagaactagaggag |
| | | ctattacagctcaaagaaaacatcgacgtattggatggtaccctaaaaaacctatctttaggttcagtaccaagaaatttagggag |
| | | tatagagaaagactaccgtcagtatcgcgatttagagattgatgctaaaagtcttttaaagcagattaataactctgtatactcag |
| | | cgcttgatcattttactgttaaagatgattattcaattgctgagaaagactttcgtagcaaagcagccatattacatgcgaaaata |
| | | agaaaattttccaataaaggacgcaatatattaaaagaagagatgttgcgtttcgaaaagataacaaacaatacaaataaagcttt |
| | | ccatgaaaaaacatctcaatatttatccgatctacaagaaaatagaacttcactcaaaaaaacacttgaaaatttagatcttgctt |
| | | atcagattcaagacattgaaataggtcaaacctacgccccatatattaccgcattagaaagcttaagagaggaaattgatttagaa |
| | | ggcctcgcgatctcttcagtcaacgaaaatacacggttgaagaaacaggtagagcaagtgaatgcactcgctcaacttggaataac |
| | | tgtggagataattggtcatgaaatcgaaggtttcgatatgactattgagcgaggtataaatagactgtcatcaacaaacctcgatg |
| | | aatatcagaaaaatgctttatcaagtattacccaagcacatcaatcattaagcgattcttggcgttttttaagcccattaaaatta |
| | | tcaggagataaggtaagagctttcttgagtggaaaagatatttttgattatgttaatcattttttcaacagtaaatttgaaaaaga |
| | | ttcaattgaattttcttgctctactaatttcctagatatttcattatatgatcaaccagccagaatttatcctgtgtttattaatt |
| | | tagtaaacaactcacgatattgggttaaagaaactaaagaagagcgtcgaattattaggttagatgtacttgatggtttgatatat |
| | | gttagtgataatgggccaggggttgatcctgatgacgtgtccgaacttttcactatatttttctccaagaaacaaagaggtggtcg |
| | | cggggttggcctttatctctgcaaacaaaatttagcggtgagtggccatagtattttctacgaaacaagaacagagaaaaaaatac |
| | | taaatggtgctaattttgtaattaatttcaaaggaattaaaaatgcttgataattctactttcgattacaaaccacatttaaaatc |
| | | tgcttatattgatccgattagaactgtgacagtcatcgatgatgaatacccaactattgatgatttaatttcaccgaccaaagaca |
| | | gtttttctcaagacaacatttctcgattaaaagatattattgatataagtcgaagtgaagaatataattggcttttagatgtctat |
| | | aatggaaaagagaagaaaattcaagagggaaccgtatctaaccgtctttatcacagtgatctactaatcttggactatcatttaga |
| | | tggagaggactctggatattgtaaaaaatctatagatattattaaaaatctatctgaaaatcgtcattttaatattgttgcagtgc |
| | | atactaaaggttatgatggacaaaagggttcagttaatgaggtactaatcgatattattacttccttacaggaaagacccgctatt |
| | | agtattttaaatgataaaatcaaatctagaatagatgatgctttagatgaatgggaaatcgaagatccaagtatcagggaagatct |
| | | aattaattcagtttctacattagatttacttttcttgattaataaattcgggtcaaatttaagttcaggatgtttcgactacgaag |
| | | ttcttgatgtttttcataatatatttgatcaaaaaccagacaatataaacatatccaaaatattgatttttaaatggatctcatca |
| | | gaaaagttacatagatacgctgaccaatttaataataagacatcaaagttctttgattgggggacaaatgaaaaccacaattggat |
| | | aaaaacagaagacttatttattactgtccttggtaaaaaagacacaccaatcagtgacataccgaatcaacttttggaggctttgt |
| | | caaactctaaaccacatccgcacaaacttattttatcaaaactcagaagtgaaattgaaagtaatggtagctatgctgcaagtaat |
| | | ataattaacaaaaaattcttacaggcggcgtggctaaaggaattacttcaaaaagaggatgaatatgctatcaaaacagctgcatg |
| | | gcaagcagtaactaaattgtgggaagaattagcatacgaaataaaacagagtcttgatgattttacaattaatcttgtccgcgact |
| | | taaagaaaattaactcacctttaaactatttcatagagaaatctacacttgatgctgaacttgaacaaattaaacatgcaaattgt |
| | | ttcagttgttcaaaaaaaataactgctcatcatttggttacggggcatgttttggagttcaataataatcactggttgtgtctaac |
| | | tcctatgtgtgaccttgttcctggtcagaaaaacggaaatagtttactccctgttacgctcgtgaaaatgtatgatgcgaaagttg |
| | | ctttaaataatacacgtaaaaatatgcaaaacgagcttaaactacccaatttgccagaaatcaacgaagatgaatcaattagacaa |
| | | atactaaattattccacacagaataatctattgttcgttcagtctgaacatgacgggaaaatacatattcttagtttcaccgttgg |
| | | actcgatggcaaggcaaatcctaaagcaatggattgctatgtggaaaatcaaggtattttctctgaagataaaataatagcactaa |
| | | aatatgccaagcccactgaaaatgaaatgaacataatatccgtagaagcaaaaatagttgctgaattacgctacgaatatgctttg |
| | | aatttattaggtagactcggtgtatcaaaatctcgagtcggattagattttatcaactaaggtgcgttagcacgcacctagtctga |
| | | caggtaccagttgtttatataggtatctgtcagactacatcctctttaggtttctctcgcccagataattttttccatcaagtgac |
| | | attttcattgatgtctaactctcagacattaaagtgtctaacttccttattaatgtcacaagcaacaattgaatttcaccgctttt |
| | | gcgagcatgatcgcaataatatcagcccgttacccggttaattcctatgacatcactcgaaacactgcaatcggctatctctaacg |
| | | tctctgtatggcgtcagggtgatgtatgcgcgccgcataaaccgttgctgctgctgtatgtgttgtcacagtacaaagcaggccac |
| | | ccgcgcctgtttaactacggcctagagatccacgaaccactcactcgcctgctaaaagagtttggccccaagcgacgcactgacta |
| | | tcccaatatgcctttctggcgactcagaactgacggcttctgggaaattgctaatgcggaaggctgcaaaccccgtagaggcaaca |
| | | cccagccgacaaagaaagagctgattgataatcaggtagcggggggttttgatgaaacagcttaccagcaactgcttgcacaccct |
| | | gaagtaattgaccaactggcccagcagatcctgatggatcgtttccccgagagtattcagcggatcctcgccaaccaactgggtct |
| | | ggattttatcgaccgttcaaagagccgcgatccgcgtttcagggatatcgtgcttcgggcttaccattcgcgatgtgctttctgcg |
| | | gttacgatctacgactcgatggtgcgctggttggtattgaagccgcccatattcactggaaaacctatggcgggccgtgtgtggta |
| | | aacaacggtctggcgctatgttcgctgcaccacgatgcttttgatatgggcgcattcgggctggatgaaaaccttaccatccgcat |
| | | ctccggcggcgtcagccgtagcccggtggtggataacctgttctggcaacggaacggccagcagttacaccttcctcacgacaaat |
| | | cgctgtggcccactgaacaatacgtcggctggcatcgtaaacagatcttcaaagcctgagaccgtgagcttcgcaggtatcatcga |
| | | ttgcccaaactgctttatcccctacaacggataaattgcttttaacccctatagcggataaatccagcacaccagtgttggacttc |
| | | agaataacgaatccaaactctagccctgagacaccaggctcttgattattattgataccgtattaatctgtacgaagtttgacccg |
| | | c (SEQ ID NO: 67) |
| 71 | pLG073 | gtaacaccgttgaacgtcggctgggtgttgttcataatccctttaaaaggtctggggatggccatgacctcagggcggtagcgtga |
| | | ccaaagttcatatccataccaattatttttatttaaaatatcaacttattcgagttgttttatttagttcaaagaaggtatcaaat |
| | | tgatagttatagattttttttgtggctgtggtggagccagtgaagggctacgtcaggctggctttgatatcgagcttggattagat |
| | | attgaccaacaagcatcagaaacatttaaagctaatttccctgatgcaaaattcatccaagatgatattaggaaaatcgaacctca |
| | | agatatctccgacatcattgatattaaagctaaacggcctttgttactgagtgcatgtgcaccatgtcaaccattttcgcaacaga |
| | | ataaaaataaaactagtgacgactcaaggagaaatctactaaatgaaactcatcgttttattagagaacttcttcctgaatatatt |
| | | atgcttgaaaatgttcctggaatgcaaaaaattgatgaagaaaaagaaggcccatttcaggagtttattaagctacttaaagagtt |
| | | agagtataactatatatcttttatagccaatgctgagaactatgggattccccaaagaagaaaaagactcgtgctcttagctagtc |
| | | gagtaggtaaagttaccctaccagagataacccatggtaaaaataaaatcccattcaaaactgtacgagattatatccaggacttc |
| | | acaaagttatgttcaggagaaaccgaccccaaagatcctttacatagggctggaacactgagccctcttaacctaaaaagaattat |
| | | gcacactccagaaggaggggatagaagaaattggccagaagagttagttaataaatgccataaaaattatgatggccacacagata |
| | | cttatggaagaatgagttgggataagcctgcgcctacacttacgacgaaatgtaatagttactccaatggtcgttttgggcatcct |
| | | gaccccactcaacatagagcaattagcataagagaagcatcaagattacaaacatttcctttaagctatgtttttaaaggttcgct |
| | | gaattcaatggcaaagcaaatcggcaatgctgtaccttgcgaactcgctagactatttgggctacatctcatagaaaattgtacta |
| | | ataaggattcatagatatatggctaaaataagaacaaaggctcgagctttggacatgcttggcagacaacaaattgcaggtatacc |
| | | tactgccttgagtgagttatttaaaaatgctcatgatgcctatgctgataatgtcgaagttgatttttttaggaaagaaaatcttc |
| | | ttatcttgagagatgatggattaggtatgacaaccgatgaatttgaagagaggtggttgactattggaacctccagcaaattaatc |
| | | gacgatgatgcaattaataaaccagcagtggatagtaataaagcctttcgccctatcatgggagagaaaggaataggccgtttatc |
| | | tatcgcagcaattggaccacaggtgctggttcttactagggccaaaagagacaatgagcttaagccattagttgctgcatttgtta |
| | | attggagtttatttgctataccatcacttgatcttgatgatatagaaataccaattagaactattatcaacgacgaatgcttcact |
| | | aaaaaaactcttgatgagatgattgagcaagcaagaaataatttagactctttatcacacaaaatatcaaaatcaaaagtatcaca |
| | | aataaatacacaattatcatcttttgaatttgatcctattctatgggaaaaaaaattaggtgggctaagactatctggagatgggc |
| | | atggaactcacttcataataatgcctaccgaagaaatattaatagatgacatttccacgagcgatagcaataaaacatcagagcag |
| | | tcttctcgcttagaaaaagctttattaggttttacaaacacaatgtacagtgattcaaaccctcctattatagctcgttttagaga |
| | | ctatctggaagatggtgagtgcattgacagaattagcgaatcaattttttttacaccgcaagaattcaatcttgcagatcaccaca |
| | | ttgaaggatggttcaatgaatttggtcaattcagtggaactgtttctgtttatggtgaagagccaattcatcatgtcgtgacttgg |
| | | aaaaataataatcaattaacccaatgcggtccatttaaaataaaattagcgtatattcatggtcggcttcgtgattcacgcttacc |
| | | catggagttgtgggcccctctgaaggagaaaacagatagatatggtggtttatatatctatcgagatggattaagaattttgccct |
| | | atggagattcagatacggattttctaaaaatagaaaagagaagaacgttatccgcttctgaatattttttctcatatcgacgtttg |
| | | tttggagcaatagaattaacaaaagaaaacaatgcttcattagttgaaaaagctgggcgagaaggattcattgaaaataagccata |
| | | taaacagtttaaagaaatgcttgaaaatttcttcatcgaaatcgcaagagatttctttaaggacgatggcgatatgtctgaattat |
| | | ttgttgagacaaagcaacgtagaaatgaagaacatgatttgttatctaaaagatctaaacaaactaaagctaaaaaagatagatta |
| | | aagaaagatctgtatgatttttttgataagttagataatgattactggaatattgaaataaataagctaatcaataaaaacgagga |
| | | atatttctccagtacagaaataacagacaccaatatagattatgtatacaataaaattaaagaacaaaatgatgctatcattaaaa |
| | | atctacgtaattctgtggatataaagaaaccctctggagttggattaacaaaagagttatctaatttatgggatagatatcaaata |
| | | gaaagacaaaaaatactgttatcactaaatgagctaaaagataacgttgatagaaagcttatagaactggataataaaaataatga |
| | | ttttctcaacttacggaagagacttgaagattctttgaatctacaacaaagttactatgaaaaagaactaacaaagttatataatg |
| | | acgctaaaaatgctttgaaagatgtgcaatctaaagcaaataggttaatttctgataataagaaaaaacataagagtgaactaaaa |
| | | aacatttcttatgaattccaatcaactaatctcaatggcaaagatactgcgtatatattggatgtaaaaagaaatctagaaagtaa |
| | | aattgagaatacttcaaacgaagtgattaatgaaataagaaaactaaccgaccagattgcaataattagtgatagtaccacttctg |
| | | aaaatttatcatcggctcaagtaactgaagcaatcgaaactgaacttgaacatttacgagaccaacaagcaaataacgcagagtta |
| | | atactacttggcatggctctttctgtagtacatcatgaatttaatggtaatattagggcaattagaagtgcgctaagggaattaaa |
| | | agcatgggctgacagaaatcctaagcttgatattatataccaaaaaatcagaactagttttgatcacttagatggttatttaaaaa |
| | | cctttacaccattgacaagacgtttaagtcgctctaaaaccaatataactggaactgccattttagaatttatcagagatgtattc |
| | | gatgatcgtcttgagaaagaaggaattgaattattcactacctcaaagtttgttaatcaagaaattgtaacttacacatcaaccat |
| | | ttaccctgtctttataaatctaattgataacgcaatatactggcttgggaaaacaactggagaaaaaagacttatacttgatgcta |
| | | ctgaaacaggatttgttattggtgatactggtcccggtgtttcaactagagatcgagatataatatttgatatgggatttacacga |
| | | aaaacaggagggcgtggaatgggattattcatttccaaagagtgtttatctcgagatggatttactataagattggatgattacac |
| | | tcctgaacagggtgctttctttattattgagccatcagaagaaacaagtgaatagcggatataaataaatgacaagctctactgat |
| | | tttcataaactttctgaagactgcgttcgccgttttttacattctgtagttgctgtagatgacaatatgtcttttggagctggtag |
| | | tgatactttccctacagacgaagatattaatgctttagttgatcccgacgatgatcctacaccaataataacagcatcagcatccc |
| | | caaggatagaatcaactaaatcaaaagcaaaggtaaaaaaccatccttttgattaccaagctctagcagaagctttcgccaaagat |
| | | ggtattgcttgttgcggattattagctaagagttttaatgttgaagaaagagatataattacagcatcatcccacaaggcagatat |
| | | aacaatacttgactgggatatgcaaagcgatagtgggcaatttgctattgaaataataaaatcgataatcgtttcagatataaatt |
| | | ctggaggacgtttacgtcttctttctatttatactggtgaacatgttactgctgttataactaagttgaacaatgagttaaagaaa |
| | | acataccgtagcgtaataaaaaatgatgatagtatttttattgaagataactatgcactcgaacaatggtgtatagttgttattag |
| | | taaagacgtttatgaaaaagatcttccaaatgtgttaataaaaaaattcactaaccttacagctgggttgctatccaacgccgcac |
| | | tctcttgcatttctgaaataagagaaaaaacccatgggatattaacaaaatataataataaattagacactgcatatgtttcccac |
| | | atcttaaatttaataaaatccaaggagtcaagggcatatgcttatgaaaatgctcatgattatgcagtagatttaatttctgaaga |
| | | aataagatcaatattgcaaataagtgaaaacttaaagaaatctctaagcaaaaactccttatcccattggcctatttttcactatg |
| | | caaaaaatggttgtaagaattttctattaactggaaaaaaacaaaaagacttatcagtagaacatctaaggaatatactctctgct |
| | | gattctttagaagaaattcaacacgctattgaacacgcatctttaggtaaaaaggaatacttaagccaagatggtgaagaagataa |
| | | aaagttaatgcaattatgctctctggaaatcacgcgcaggagtttaagatatcattctcatatagataatgtgtccttaaaacaag |
| | | gaactttacttttagatgcatataattttgtctatctatgcatacaaccattatgtgatagcgtcagattgcatgaaaaagccgat |
| | | tttttattcctcaggggaacactggacgataataattacaatttgttaatcgaagatgaatatggcggtttttataaaattaaaat |
| | | gccggcaaaagcttctaatattatttcattttcatttggagtcgaaaatggaaacggtgtcatcatagggaaaaagaacaatctag |
| | | ttaatactgactatatctcattcgttcctttactcgttgaaaaaatatctactccaaaagtattgaaatggatcggggaaataaaa |
| | | acaacgtacgcgcaaaaaataacaactgatattgttgctaatctgtcaagaataggtttagatcaacatgagtggttacgaataaa |
| | | atcaaaagatatataaatgattatatatgccgtcgttttataaaaactggcggcatgtatatctagttagtccatcatagaagtca |
| | | agaaatttagtttgccctatatcttatagaaaatatattttatatgcttaaaaaacaccatctttataagatggcatttatgtgct |
| | | ttgtttcgatcaattacaactg(SEQ ID NO: 68) |
| 72 | pLG074 | gattattatccagcctttgcgcaggagagggcatgaactgctcactctgatagccgctcttgccatagttgagcttactccacaaa |
| | | agtagacacattctgttcttacctagacgcctgctcaaaggcggccgggatgactatagcggtgatccagattgtacctgatccct |
| | | atacatgatttgtatcattgtcaagctttttgaacgatttaatctcttattggagttcatgatagccacttgaatttcgaaaataa |
| | | ggtactatatctagtaaagtcttagtcaatttttggtatatacagtggaagtggaaccatttcgtgtcctttgtttagatggcggt |
| | | ggaatgcgtggcgtgtatcaggcgacgtatctcaatacatttgcacagcgtctgcataactctggtgaaggagtcttagatccagg |
| | | aaaggcatttgatttaattgtgggaaccagtacgggaggcatagttgcctgtgcgctagctgcgggggtctcacttgaaaaggttc |
| | | ttgcactttatcaagtgcatggcggaaaaatattccctcggcaacgattacgtgcactacctcgagtggggaagtatgtccgtggc |
| | | ctattttctggtcttgcgtctggcgaccaggctctgcgagcagtcctttctgattcattcggtaccgaaactatggggcaggtcta |
| | | tattcgtcgtggaattggtttagccatcactacagtggatctgaataggcatgctgccacagtttttaaaacccctcatatgagtc |
| | | gtcttaatggacgtgacaacgatcgactattagtcgatgcctgtatggcgactagcgccgcccctatcctgagatcaatagctcgt |
| | | ctaactgaacctggcggtggagccactgttgattatgttgatggcggtctctgggcaaataatccgggggctgtcggcatgataga |
| | | agctcatgaaatccttcagcagagaggagagattgaacgtccgattcatttatttatgctcggtacgcttccattgcaaggaggtg |
| | | aagaacttaagagcgcagataaattacatcgaggtgttttggggtggggagcagggattaaggccatcacagtaagtatgaattca |
| | | caggcagttgcgtacgactacttggctcggaaaatcgcagaattgcgaggatatggaagttttgcatatcgactcccagcacaatg |
| | | cccatcaggagaactccagaaatatttggaaaatatggacgatgcacgtcctagggtgcttaatgcgcttgcccgacaagccgtct |
| | | cagatgttgattacgcttgggctacggcagaatcagtaagtaaaatgggcgcgtttcgaactgcattggcaagttcgtccaattat |
| | | agttgtcataaatccgaggaacaccatgaccattattgattgtaataaagagatgagagggtatcactcagaagaggtaaacctct |
| | | cgaatgcagagcaggcagaaatgcgcggccgccgcgacaatggtcgaacaaggctccgaaacggattgacaaaggctggtcatcct |
| | | ttgccgaaggagttcagttctcaaggctcttatgcgatgcgaacaatggtccaggatgatgcatgtgactacgatattgatgatgg |
| | | cgcgtatttcgataaagaagaccttaagaactctgaaggcgattatcttagtgcgctagatgttcgtaagcgggttcggaaagcat |
| | | tgaaagacgaccgattggcatatgatgcggttgtcaaaaccaattgtgtgcgtcaaatgtatcccgatggatatcacattgatatc |
| | | cccatttatcgtacgacctgttctaaagatatttgggataatgacatcatagagtatgaattagcaagtggcgacgaatggaccaa |
| | | atcagatgcacgtaaggtaacgagttggtacaacgatgcggttggtaatgaactgaaagcgggggaatctgataccagtcagatac |
| | | gcaggatcaccaaacttactaagaaaatggctaggagccgtaatacctggaaaaaaaagacaaccagtggcatttgtatttcgaag |
| | | ttagttgtagacaatttcgttgcgcgctcaaatcgtgatgatgatgctttgcgtgatacctggaaggcaatcaaattgcagttaga |
| | | agtcagtcaacgtattacccacccggtgtttacggacaaaaatcttgctgaggaaggagacgaatgcgttatttttttccgggaat |
| | | gtttgggtgaggtgctggaaacattaaaggtgctcgacgagcatgactgcacaagtaagaaggctggcgacgcttgggatgaggtg |
| | | tttaatacaacttattttagcgcccagtgtaccacggataacactacatctaaatcgctgctacggcctgcagttgcggccactgc |
| | | tagcctgtctttccctagttatcccgtacaacctaacaaatcatcggggtttgcctgatgaagtgggctatagacgatcccgtgcg |
| | | tttcctgagggagaaggatgaactcacacatcttgaaaccgagacgggttggctaagcacggcttggcgtatatctgaagagggct |
| | | cgatcaccgttgatatcgacatgtttatccatgggcgattgtttgctggggaaatgacatatccggacgcgtttccggattctccg |
| | | ccctacatacgtccgcgagataaatcagagcgatggactaaccatcaatatggcgtgggtggttcactgtgcttgcagtggcgggc |
| | | agataactggcatagtaatgtgactggtgcagatatggtacgcagtgcgcacgagttgctgagtacagaacagcatcctgaattac |
| | | ctcattctgttccctctgcgcatcgcttgacggaggggcaaaaccttaatttcgtatttcgacgttatgtccctacctccgaagtc |
| | | gaaaacatatttactatgctcccacttcagtctagaacccgaatatcatcttcaactgtgtataacgaagggtcggcggtaatgtt |
| | | cacagccagagtcgctgacgaacaggatgagcttcgaaatgttaccgatatccctcaagggctcatcgattttgttagtattttgt |
| | | cgttgtcctatgagggctgggtctttagaagcgactactttagccagaggcaatccttagaatctgtagaagcattaatccagata |
| | | ttgatgatggccggttttaacaccgatgacattctggttaaggaaggggataagttcaaggctaggacgatcatattattaggcaa |
| | | ggaatggtcatcactgcgagtattcctgttagattctggggagcaaccagtgctgcgggagcatcgagttgttagatctccgaact |
| | | caaccttaagactttcggaagaatcacagaagttgagtaagatccgcgtaggaattgttggactgggatccgtaggtagcaaaatt |
| | | gcaatttcacttgctcgttcaggtgtcagacaattcttattagtcgatgacgactatctcacgcctggcaacttggtgcgtcatga |
| | | gttggggtgggcccatgtgggagctcataaggcacgggccgtaagcaatactttagcgcttatagcggctggtgtgaaagtggatg |
| | | taaagactatgcgtcttgcggggcaggaatcggcggtgacagcagcggctgcactaaaggatctgtctaattgcgacttgttgatc |
| | | gatgctacagctaatccagaagtttttttgctgttagctgcgactgcccagcgaaatggaataccgatgtgctggggggagatatt |
| | | cgcaggtggttacggaggcatgatcgctcgagcacgtcctaaacacgacccaaatccattagctgtgcgtgacgcttaccattctt |
| | | atctctcaaccctccctgaagcaccatttaagaatatggctagctatgatgggagtgatgaacaaccacttatagcatacgacagc |
| | | gatgtgggctttattactactgcactgacacggttggctgtggatactgctctatgcagagagccaagcgaatttccgtactcttt |
| | | gtacttgctgggtatgcgacgtgaatggattttcgaggagccatttgacacacggccagtcgaaataagtggagaaggctgggaac |
| | | gcgacgaaaatgctgtgagagatgaagatagggtcgcagttgcaaaggcattggtaaatatgtttcaaggaaaacaaagtgctaac |
| | | actgatcctacctcctaagcagcatgagttaatgatgactgcactccaaaatgctggtcaacgcgaagtcggcgggattcttatgg |
| | | gtgaacatgtcgggacaaatactttcatcgtccgggagataactatacatcgccgtggtacgtttgcttcctttgtacgacgtatt |
| | | gaggatgctattggtgggctccgtgttttttttaaaggaactggatacgattatgttcgcttcaattatatcggtgagtggcattc |
| | | tcacccttcatttgagccatacccaagcagaacagacgatctgtctatgttacagattgtaaaggatgaaaccgttggtgcaaatt |
| | | ttgtggctttgttgataatcaagctcggacctgatggaaaaatggtttcaacagtccatacatatcttcccgatggttcgaagatt |
| | | ctctcaactcttaagattcagccttaactcagaatgtcagattgtgaaattcatcttctagaggctaattgaagcatgctgattat |
| | | tttttgaggcggaagtatgttgcct (SEQ ID NO: 69) |
| 73 | pLG075 | aactcacccgctctgaacgagccccttgaaacacaagacaccgtttttcccttaccataagggataggcaaacgactgtgtttatg |
| | | actaccagcagagacaaaaccatcgaagtgctcggccacccatttgcgcctctaggttgctacgagactgcagaggatccatgtag |
| | | cagattacctcggccatgaagctgctaacggaagcgaagccatagaccgtaggcgatacacgtacgtatggctttccggaagggcg |
| | | atcctagtcaactgtctgatgtccgccaaatctttctcaatactggtcattcaccttttccttgaccggctgtcaggcccaacgtg |
| | | cattcagatcgtcgcctaaatttgttgcatcacgtagagtctgccgcgtgctcgcccctatgccagactagtctgatgtggcggat |
| | | gagataggtcacgacggtggtggctcggtagagtcggcatcgccgagtcaacgatggaacgtaaggggcgtgaatgcaaatcagcc |
| | | gtaagctcaacctttatgagatcgaggatctctaccagtcgcttggtacggattccaatctcaggcttcctatcagcatgagccac |
| | | ggcggggggttgggcgtggatgcttcgctggcccagttcatcgtcacctgggcacgtgcttgcgaaaaaaccgtccttcacctata |
| | | tgcccccgctggcgacgacgccatgacgcaaatcacgcagttggcgcagagtgcttctgggttcttcgcgctgatcatgtgcagtg |
| | | aagtccacgctcagaatcatcaactgatcgatcggcgggaagcgcttctggcgatcaggccccttgtcgatgcgatgttcgcaggc |
| | | gaccttcgtaacacctccaacatccgaggcgcccgtccaacggccatcaatctgttctgcgtgaacaacgcaaagcgtgagttcat |
| | | caagccgttttacttcgatcacgccgtgccgaaagtccagccgagatcttggttctcgactctcttggagacgtcatcgaagctga |
| | | tgaatgctcgcagtggacaaggggcactgcttaggtcaggtctcccggcattgggcagcgtgctttgggagttgatctccaacgct |
| | | gaccagcacgctgtcactgatgtaggcgggaacaagtacaagaaggcgctgcgtggcacctccatcaaactcaaccgaatgagtcg |
| | | tcaggatgcgctgatgtattcagaccaagagccggagttggcgcgctttatcctgaagcatttcctgagagctgaggtactggact |
| | | tcctggaagtctcggtcatcgacagcggtcctggactggcacggcggtggctgacggcgaaggaggggcggccagtagaaagcctg |
| | | gaggagctgagtcttgaggctgagcttgaggccacgctcgattgcttcaaaaagcacattacatccaagccgcagtctccgaactc |
| | | gggtatggggctgcataacgctgttcaagcactcaacaagctcaaggcgttcgtacgcgttcggacgggtcggctttcactgcatc |
| | | aggcttttcagggaagtgatgagattatggagttcgatccgtcgattcgatacggtggccgtgtgttggccgctgtggaaggcact |
| | | gtcttcaccatctgcattccggtgagctgacatgttcgatctcatggattttgaagtcgagttgcgtcagtcaggtaagccggttc |
| | | atgtggtggttttcttcactggccctgatctcctcacagacacgcaagcggctcacgctctacagcaccaattgtcgggttacgtc |
| | | atgcctgacctagtggtgtttctgatgcctggttacaccttggatgaattccgagcacaccaggcaaatgctacatcgcccctgat |
| | | ggcggagctaagccgtaaaggcccaggctcgcctcgcacctacgcgagtgcgttctatgacgtgaatggtgccattaccgagtacg |
| | | tcaatatctctggccctgaggagcagttcgaggaactcatcaagcacaactctaacgctatcgcgaggactggcctgacccacctc |
| | | gtcgaacgctccaacgtgctgaagaaggcgcctgcaggcttcttctactcaaagccctcttctcgggcttcgaactatttcattcg |
| | | ggcggaagacctgctctctgagaccttgcatgcccactacctggcgtttgcatgcctatctctcatcagtaaggcaacggaagatg |
| | | ggatggggacgcccgataccctgtatctggacacaatcgcattgctgcctctggcgctgtccatgcaggtgtacctcatgcgattt |
| | | gagcagccgggctttgcgaatatccggtcattccattcgcacgaaggcctaatcaagggtgggcctttgcccaaggcagtttccgc |
| | | cctgtgtctcatttccgcatcgacccagtgcggcctcgcgcagcaatgggtgaaggtaaacagtgctccgccgacgcgcgtggcca |
| | | ccattctttcatttgagcgctcatcggactcctgctccgtcttgcacacactgaagcagcccgaagactttgaaatgttgggggag |
| | | ggtgaagcgagcgggattcgtctaattcggatccatggcgagcggttcgttgctgagcacagtgaaaccaagctgctgaacatcgg |
| | | cactgatcatgcgccgcccctgctgcaatccaagttctactcgttcatgggggccaacctgttcagctgcttcacccatgaccggc |
| | | caggactgaggcctcggacagtgcatgtcgataaagataacctggtggctgccagcgatttcggtgaatggttcgacagggtactg |
| | | cttgaggaagctgtcgcgtcgacccgttggatcatccacgatgacgacgctgccagtgcggccctggccgatcgagcgatcgctta |
| | | cttagggatgtgtggcgtcaaggtcggtaacaaggtctccttcgatgacttcgatgccaacacgaattttgacgggtctgtcatcg |
| | | tcattgccgctgctgccgaacgtggctcacgcctgcagagtgtgagccgacgcctgcgtaccgctcagcaatcgggtaccaggctt |
| | | tacattacgggggcactcttcgggcgcagctatcaactgatgaaggatctgcagagcaacctgacgcaacctgccaaggatcacag |
| | | ccggtatgttttcaagacgtacatggagatcccggcagcggagcttgcctgcacgagtcattgggccgaagagcagcggctgctca |
| | | tctccttgcattcatttgcggaaactttctcgccagcgattacgcagcgcatggaagtatttgatcgcgcctctactggggggctt |
| | | ggtctgaacccattttggccgagcagtcacaccgggcagccgatgacacttagccgaggctttgcgtttgtcgacggtacgaagga |
| | | tgtgaggggcgcgacgtcaacggatatttacctaaccatcttgtggattctgcagaatgcccggtacagcggtaaggtgcagaacg |
| | | ccaagcggcttgagtccggtgagcttcagcaggtgctcctatcgccggatgtgttctcgcgcttcgacgatggcgttatccaggcc |
| | | gcattcttgcgcgcagcggtgccggcggagcttgactacagggctcatgaaacccacagcctggccatatcggacatcattcagcg |
| | | catcgccgcagggtacggacatgaacgtggtgaagccgccatggagtttgtcatggccttggctatcgggaagatacgactgcaca |
| | | aggatgtcgataaccggctgcggagtaacttgatcaatatcttgacgccgcacgttcaggagatccgttatctgctggatccgaat |
| | | tacgaatcaccgttgtgatcaatttccgctaacccgttgcatgcgaggtatccagttaccggcaactcagctcatggctgagctga |
| | | accctggttgctcttctagtttcgatggcttgccgattgccgggatcacccacctgcgtcggttctgcgacgaaggtctaagggca |
| | | gggtggtggcacctggcttgctcattccgtttgacctcgccaccat (SEQ ID NO: 70) |
| 74 | pLG076 | cgctcagtccggttggtggttttggttggtttggcgattgctcagatcgcacaatccgggctgagttccctttcagtgatctacta |
| | | ttccgcgcagctatttagtggatataatcacgctttgaaaaaaaaacgggtcaattactcttcgccccacagcaacgaataaggag |
| | | aaatttgtgagtaacgtcaacactttccttaaggaaaatttatcttcagtaagtaagaatgtttttgtggctcctggcatccctga |
| | | aaaaaaactgaataatgtcgctaaagcatttaatgttgtggataacttgaatactgtgctagccatttatgacaatacggtatttg |
| | | gtagcgcaaaagatggcatcgtttttaccggtgaaaaactggtcataaaagaagcttttgaaagtccttatgacttgttctacagc |
| | | aatattgaagcagtagaatatatagaagatgtcacggtaaatgataaaggcaaggagaagcgaacagagtctgtttccctcaaact |
| | | aaaaaatggcgaggtaaaacgaatcaaaggcttgatggagtgcaactataagaagttgagcgacattcttaagcataccatcagtg |
| | | actttgatgagttcaaagaagaagatcagctcatcactcttgccgaaatgtcagaagctctcaaagtggcttatgtcaaaatcatt |
| | | gtgaacatggcgttctcagatgatggtcaggttgataaaaaagaatttgccgaaattctcttgttgatgacccgacttgagttaac |
| | | gactgaatcccggtttacactgcgtagttatgtcggttcagaatccagtctgataccggttgaagaattaattgcgatcattgacc |
| | | gggaatgtgtcccaagccataacaaatcaataaaagtctctcttgttaaagacctgattagcattttcatgagtgttaatgaaggt |
| | | gaatataaaaaattcccgtttcttcagcaagtgcaacctttgctgggcgtaactgacgaagaaatagaactcgcagtaatggctat |
| | | tcagcaagattttaagatgttacgggaagatttttccgatgatgcgctgaaacgcagtatgaaagaacttacggcaaaagcaggtg |
| | | cggtaggcgtgccactcgctgctgtctatctctctggctctgtcatcggtatgtccgcagcgggcatcacttctgggcttgcaaca |
| | | cttggacttggtggcgtgctgggtttttcaagtatggcaacaggtatcggtgttgcggtgttattaggtgtaggtgcctataaagg |
| | | gattcgtcatcttacgggtgccaatgaactggataaaaccaagcgccgggaactcatgcttaatgaagtcatcaagcagacacaat |
| | | ccacattgtccgcgctaattaatgatctaaattatatttctggaaagtttaacgacgccctggatgcgcataatcggcaaggagaa |
| | | aaaattctaaaactccagaagatgatgaatgcattgaccggtgcagcagatgaattgaataagaaatctaataaaatgcaaaacag |
| | | tgcactcaaacttaagtgccctgtttatcttgatgaggccaaactcagttcgctgacccgagagcccatcaaaaaacaattccatg |
| | | atgttgttctttcattctacgaagaatatcttgttgaagagcaaaacgatgggaagagtgttgaagtgaaaaaacttaagatcaaa |
| | | gaaaacgcttccactcagcaattagagaaacttgccgcgatctttgaaggcatcggctatttcagagcgggggatgttattaaagg |
| | | caaactaactgggctattctcataatgaaaaaaccagatactcaggtatcggccttgctggtgcagaagcaccagcttgaacaaag |
| | | cgagcatcaattgggtgaccttgatgctgctctagaagcgcttaacgctttgcaaactgataccgaagcttctttagatgaaatga |
| | | ttttggctatggatggtgttctggaacactcaggtatcacgtttgatgaggatatccacacaacggtttctagtgaattcagcgat |
| | | taccttgaatcctgtttgaccacgtcatcgtccagtatcagtaaactgtcgatgatagaaacaatagcgttcaccagcgatatgga |
| | | ctgggaaacctattcccagtccatatcgcagtatgcccataaacacaatatcgatttaatagtcgatccgtttagcgccctgatgt |
| | | ctccaatccaaagaattgctctggaaaaacgtattcaggaagacttgaccttaaagactgcccgctgcgacaaatatgattacatg |
| | | atcgctggcacctgtggcgttattggcggacttatcgatatttttctggtaggcgtacctggagcaggaaaactgacccagcttgc |
| | | agataatgcagtggacggtgccgttgagaaattcgcttcagcctttggatggaagggcagttcagaagcaagcgattcgacaaaaa |
| | | gcgctatcggttttctggagagaaaattcaaaatcaattatgaccatcggcatggcggagatgttgacggtttgttcaggatgaac |
| | | acgaagaatcaccatattaaaagtctcgcccactccccggacttagtcggtttatttttctcgatcctggatcaatttaccagtac |
| | | ggcacattttgtggcagacggaaaattggtttccgtagataccgagacttttgagcttaaagggaataacgttgtctctaaggtat |
| | | ttagtggtttcgtaaactggctgggccaccttttctctgatatggcaggttcttccggtgcagcagggagaggctccggtatcccc |
| | | attcctttcttttcattacttcagtttattaatgtgggtgaatttggccagcatcgccagtctttcgcaaccgtcgccgtccaggt |
| | | ttttgagaaagggtatgacttacggcatggattagcgatggcgatccccgtcatgattactgagttgcttgtgcgaatcacctgga |
| | | cggttaaacaacgttgctatcataagaaggactggggtgaatgtattccttcagcaaataaccctgaactcaggcgaatgttgctt |
| | | gtggcgcatggaaccttgtgtctgatggatgtaggagatgcggcacttcgttcaggaggcgaaatgattcagttcctcctgagaac |
| | | gaacctcatcggctggacgaggtttggaattctagcgattaaagaactccatgtctggtataaagcaggcggaattgatgccaatg |
| | | ctgtagatgaatatatggatcatgaacttcggcgaatgctaaaagcggggtagcgttacggctttgttgaataacattacgtttgg |
| | | gtgcttggctgtaaaaagctaggcaatggcgtatctgtcgacgcaatgcagaaaaggcaacttaattgcgaaacagaaatgttcgg |
| | | tgagttgcttgaccgtcctatggcagctaagtgccagaagtcgacgttgctaacatcagtatgtactcatcggcacagtccatgtc |
| | | agagctattaactatagataaaaattcaataattaataaaataagaaccatctttctaggtggttcttattattaacaataaatat |
| | | tacgatttcaacgagggttagaatg (SEQ ID NO: 71) |
| 75 | pLG077 | cctggtcctgccaattgctcccccagccatatgacataatccttttgaataatagggtttttatgcttgtactctagcccattcgc |
| | | ggtatcattttacgatctctcttccagttttatgcttaccgcctttgcctatcgtagaacaatgccgggaagcgttatcagcgatt |
| | | aagggcaaggaatgggcttctggatatttgttattatgctggcggttatctggcttctgttttccaaaaagaaaaaatcgccgccc |
| | | cccagagtaaacaacaaaatcatcaccaaaataaatcattcatctcgacagaaatctctcaataagccagataacagcatgacaaa |
| | | tatgcattctcaggcctccgatgatgacgaactggcaacctttacttttgtgaacgggcagacggttgaatacagcaccagccgcc |
| | | agccgtcacgagaaaacgccgcccgtagcaataccactccagcgcgatgggtcaaaccgggagaaagcatcaccattcaaaatgtc |
| | | gtcattaatcacggttatttttatttcggcgggcggttaaaaacacattcatcaggagaatatggatatctttataacgatgactc |
| | | cgacgcttcgctggttaatgacgcttttcccatcgagcctggttcacggcattattatgatgagtcactgggatactggcccagct |
| | | ttgccacactctcccctcgctgccgtggcgcctatcttgactggctggcaagcgatcgcagcgatgcgagctgccccgttggctat |
| | | gtttttatctatttttacggtctagaacgccgcgtactggccgatggcacacaagaagccatttctgacgatgaattcaaagcatt |
| | | attcgaagagatatcgcgcctgagaaccgtatttcaggcaagcggttccttccggcattatgcaacgcagttgctggaaatgatga |
| | | tcgttctccgaccgaagttgctttctatatataccgaaaacgaatatttctcatcgaggagttcattactgttcagattaaatcta |
| | | gcgactgtggtcgataaaggacaacctatttgtgccgctctggcactggcatggatatactattttcctgattacaccctgcgcac |
| | | gcctgcccgtcgatgtcatgctgaattttccgcattattcaaacagcgttatactcaaaaatacggtgacggtattgtcgtcaaac |
| | | ccaataaaacacggttgtatttaagctatacccccgccagtggtacgcttcgggaacttcaggtaaaaaaacagatggatcttccc |
| | | gatcccagcgttttaaaagccccagttcagaaattaatttctgttgcagaatcctgtatcaacgcgctggatgcctacagtcgcta |
| | | tctcggtaaaaaagatgcctcaccaagtgatgtcgccgccatcatgctgcttcccgatgaaatactgaccgaagatgcagaacgtc |
| | | tatttgctgaatttaaacactgggcagatgagaaaatccgtgaacattcaggactggcgacagtggctgatttctgggccagactg |
| | | ggtatgcctgtaccggataagattaataagaaagaagccgagctgatgcaaaatttcgcccggcgagcaggctacggcattgcgcc |
| | | ggatatgcgctatcaccttgtcagaccggatccagaaggtcatcttgttttatttcctgaagggcatgcggaattctacgtaccgt |
| | | cggcggaatttacgtcagtctctgtggcgcttcggttgggtgccatgattgcacaaatggacaagcgcgtggatgttgctgaacag |
| | | gccgcgctggagaaaacgattaatcataacgatgcgctgtcgccaacagaaaaacgttcgctgcacgcctacctcacctggcggct |
| | | caatacgcctgcaaatcaggctggtctgaaaggtaaaattgagcaactcagcgataaagataaatccactattggcaacgtgatta |
| | | tcagcgtcgcctgcgcagatggaaaaatcgatccggctgaaatcaaacaactggaaaaaatctacgccagcctcggtctggacagc |
| | | agtgccgttaccagcgatatccaccgactgtcaaccgcagaaacaactccgacagctacgttacaaaccccatcagcgacgagcgg |
| | | cgcgttttctcttgatgaacggatccttgcccgtcatgaatccgacacaacggacgtacgccagttactgaacaccatcttcaccg |
| | | aagatgaacccgcagacgaatccccagcggagatcccgccacacgctggcgcaggtcttgatgaagcacatcatcaactttaccaa |
| | | cgtttgcaggaaaaagaacgctgggcgcgaaacgaagtcgctgagctatgccagcagtttaatttgatgctaagcggcgcgattga |
| | | agcaattaatgactggtctttcgaacaggttgacgccccggtgcttgatgatgacgatgatatttacgttgacctggaaattgcac |
| | | aagaactcaaaggataatttatgtctggcattcgtattcgtctcaaagaaagagacgctattattcagtcactgaagtcaggtgtt |
| | | acgcctaaaattggtattcagcacattcaggttggccgggtcaacgaaataaaagcgctgtatcaggatattgagcgtatcgctga |
| | | tggcggcgcaggattccggctgattattggggaatatggctcaggtaagacattctttttaagcgttgtgcgctcaattgcgctag |
| | | aaaaaaagctggtgacaatcagcgccgatttatccccggacaggcgcatccacgcgacgggtgggcaggcgcgtaacctctactcc |
| | | gagctaatgaaaaatctatccacccgaaataagccggatggaaacgcattattaagcgtggttgagcgctttatcacggaagccag |
| | | aaaagaagcagaaagtacaaatgtgtcagttccgacgattattcaccaaaagctcgccgccctgtctgatatggttggcggttacg |
| | | atttcgccaaagtcattgaatgttactggcagggccacgagcaggataatgagacattgaaatcaaatgccatccgctggctaaga |
| | | ggtgaatacaccacgaaaaccgacgcccgtaacgatctgggtgtgcgcaccattatttctgatgcctctttctacgattcgctaaa |
| | | gctgatgagcctgtttgtccgtcaggccggatacgcgggtctgctggtgaatctggatgagatggtcaatctgtataagctcagta |
| | | acactcaggcccgcgttgccaactatgaacagatactgcgtattctgaatgactgcctgcaagggacggctgaatatatcggtttt |
| | | ttacttggcggtacgccagaattcctgttcgatccgcgcaaggggttgtacagctacgaagcgctccagtcccgactggcggaaaa |
| | | tagcttcgctcagcgggctggtgtcattgattattcgtccccttccctgcacttagccagcctgacgccggaagaactctatattc |
| | | tgttgaaaaaccttcgtcacgtttattccggcggcgatgcggataagtatctggttcctgatgatgctctgacggcatttttacgc |
| | | cactgtagcaacactattggcgatgcctatttccgtacgccacgaaacacgattaaagccttcctggatatgctggccgtgctgga |
| | | acaaaacccatccattcagtggtcacagttaatcgccggtgtcgcgatcgcggaagaaaaacccagtgatatggatgaaataacat |
| | | cggcagaagatgccgatgaggacggtctggccgacttcagattatgatgaacgaataccagcggctggatccacggatacagaagt |
| | | ggatataccggcagggatgggccgatctcagggaactgcaaaaaaaatccgtttcaccgatattagcgggcgatcgggatgttctg |
| | | atcagcgccgcgactgccgcaggtaaaacagaagcgtttttcctgcccgcctgttctgccattgcggatattcagggcggctttgg |
| | | cattttatacatcagcccgcttaaggccctgattaacgatcagtatcgaaggctggaaaacctcggtgatgcgttggagatgccgg |
| | | tcacgccctggcatggtgatgttgcgcagagcaaaaagctgaaagcaaagaagaatcctgccggtattttgcttatcaccccggaa |
| | | tcgctggaagcgatgctgatccgcaatgcgggatggttaaagcaggctttcgcgccactggcatatatcgccattgatgaattcca |
| | | tgctttcatcggttctgagcggggtatgcagcttctctctctgttaaatcgagtcgatcacctgctgggaagaatcaacaatccag |
| | | tcccccgagtcgcactcagcgcaacgctgggggaactggaacaggtgccgttatctctgcggccaaatcaacgtctgccctgtgac |
| | | attattaccgacagtcagactcacgccacgctaaaagtacaggtgaaaggttatctggaaccgctgaccacctcgggccagcaatc |
| | | tccaccgtcggcagagacgcaaatctgccatgatatctttcgcctctgtcgtggtgattcccatctggtgttcgctaatagtcgca |
| | | aacggaccgaaagcattgccgccacgcttagcgatctcagtgaagcgagcatcgttcccaatgagttctttccccatcacggatct |
| | | ctgtccagagatctgcgtgaaacgctggaacagaggcttcaacaaggcaacttacccaccaccgccatctgtacgatgacgttaga |
| | | gcttggcatcgacatcggtaaagtcagctccgttgtgcaagttaccgccccccattccgtagccagcctgcgtcagcgaatgggac |
| | | gctccggtcggcgcgactcgcctgccgtattgagaatgctgattgccgaacatgaactgacgccaacatcaggcattgtcgaccag |
| | | ctcaggcttcagcttgttcagtcgctggccatgatccgcttacttatcggcaacaaatggtttgagccagctgatacccggcagat |
| | | gcactattccaccctgttccatcagatcctggcgatcgtggcgcagtggggaggcgtgcgtgcggatcagatctggtcacagctat |
| | | gcctgcaagggccatttcagaaagtccggatctatgacttcaaaacgttattgaaacatatgggggagcaccagtttctgacccag |
| | | ctctcaagcggcgaactggttctgggcgtcgagggcgaacgtcaggtaaatcaatacaccttctacgccgtgttcagcacgccgga |
| | | agagtttcgcattgtggcggggagcaaaacactgggctccattcccgttgattccccactgatgcctgatcaacacattattttcg |
| | | gcggtcgacgctggaaggtaaccgatatcgatagtgataaaaaagttatttatgtcgaggcgacaaagggtgggcagccgccgtta |
| | | tttggcggacaagggatgtccattcatgatgtcgtccgccaagaaatgctcactatttatcgggaaggcgactaccgcatcaccgt |
| | | tggcaatcgcaaggccgattttgccgataccacggccaaaaacctgtttgatgaagggctgcactgttttcgcaacaataatctgg |
| | | cttcggaatgttttattcagcagagacagcatgtctacattcttccctggctaggcgatcaaaccgtaaacacgttgtcggcatta |
| | | cttatccaacgcggtttcaaggcgggctcatttgctggtgtggttgaagtagaaaaaactacggtctcggaggttaaacaagcgtt |
| | | attcagcgcacttcaggaagggctaccttacgaatcccgtcttgccgaaagcatcgttgaaaagtgcctcgaaaaatatgatgagt |
| | | atttacccgagacgttgctgacgcaggaatatggattacgtgcttttaatattgaacgcgtgacggagtggttgcaggggcattta |
| | | tattaaggggaagaaga (SEQ ID NO: 72) |
| 76 | pLG078 | cgtgattcagttcgccagactgcagcgttttccatgaatataactccatctggtttagaaagagttccaatctaacgatattggga |
| | | ccagaatcacaggcggcagtggctttacgcttacaataactattctatcctgacaattttaagcctcgtttgttacgatgtaaccc |
| | | tataactatgtggttcctcaaccttttttgcccaaaaaatgcccaatgaagtccaaagtggaaaacagatggttatccgttgatga |
| | | gattgcagattacctcgcgattaagcgagacacggtatacaagtagatcgcaaagaaaggtatacctgcacacatgattggacgcc |
| | | tttggaaatttaaaaaggatgaagtagatggctggatacgcgatggcaaagctggcgaaaacagtaatcaagaataaaaaagcaaa |
| | | tttaggagcagtttaatgaaaaccgtacgtagtgcatgccagttgcaaccgaaggccttggaaatcaatgtcggcgaccagattga |
| | | acagcttgatcaaatcatcaacgacaccaatggccaagagtactttaaaaagaccttcatcactgacggttttaaaactttgctct |
| | | ccaagggtatggcacgcttagccggtaaatcaaacgatactgttttccacctgaagcaagctatgggtggtggtaaaacccacttg |
| | | atggtcggctttggtttattagcaaaagatgctgcccttcgaaatagccacttaggatcaatgccataccaatcagattttggctc |
| | | agccaaaatagcagcattcaatggacgcaataatcctcattcctatttctggggtgagatcgctcggcagctaggtcgagagggtg |
| | | tattcagggagtactgggaatccggagccaaagctcccgatgaacaagcatggataaatatttttgatggtgaggaacccatccta |
| | | atcttgttggatgaaatgccaccatacttccactactacagcacccaagtccttgggcaaggaactatagctgatgtagtgacacg |
| | | ggctttttccaatatgttgaccgcagcgcagaagaaaaagaatgtatgtattgtagtttccgatcttgaggcagcttacgatacag |
| | | gaggcaaactgattcagcgtgcattggatgatgctacgcaagaactcggacgcgccgaggtatccattacgccggtaaacctcgaa |
| | | tccaatgaaatctacgagattctgcgtaaacgtttgtttttgtctctgccagacaaaaatgaggtctctgaaattgcgtcgatcta |
| | | tgcatcaagacttgcggaagccgctaaagccaaaaccgtagagcgcagtgcagaagcattggcaaatgacatcgaatctacttacc |
| | | cattccacccaagctttaaaagcatcgttgctttgttcaaagaaaacgaaaagttcaaacaaacccgtggtttgatggagttggtt |
| | | tctagactgcttaaatcggtgtgggaaagcgatgaagaggtgtatttgatcggtgcccaacactttgatctttcgatacacgatgt |
| | | tcgtgagaagctggctgaaatttcagaaatgcgcgatgttatcgcaagagatctttgggactccaccgacagcgctcatgctcaga |
| | | tcattgacctcaataacggcaaccactatgcacaacaggttggtacgctattgctaacagccagcctctccaccgcagtgaactca |
| | | gttaagggcttaaccgagagcgaaatgctggaatgtttgattgatcctaaccatcagggtagtgactaccgaaacgcattcactga |
| | | acttgctaaatcagcttggtatttgcatcaaacacaagaagggcgcaattacttcagtcaccaagaaaatctcaccaaaaagcttc |
| | | agggatatgccgacaaagcacctcaaaataaggttgatgaattaattcgtcaccgactagaggaaatgtatagaccagtcacgaaa |
| | | gaagcatacgaaaaagtactaccactccctgaaatggatgaagcacaggccacactgaggagtggtcgtgccctgttaataatcag |
| | | cccagatggcaaaacaccacctggtgtagtcggcaacttctttaagggcttggtaaacaaaaacaacattctggtattaacgggcg |
| | | ataaatcctctattgccagtatagaaaaggctgcacgccatgtttatgctgttaccaaggcagacaacgaaattacagcatcacat |
| | | ccgcagcgcaaagagttggatgagaagaaagcacagtatgagcaggacttccaaactacagtgctctctgtattcgataagctcct |
| | | gttccccggtaacaatcgaggtgaagacgttttacggcctaaagcgctggatagcacctatccatccaacgaaccatacaacggtg |
| | | aacgccaagtcgtgaagactctcacgtccgaccccatcaagctttacacccagattaacgaaaatttcgacgcactgagagcccga |
| | | gcagagtcattgctgttcggtactttggatgaggcaagaaagacagatttgctcgataagatgaagcaaaaaacacagatgccttg |
| | | gttgccaagccgtggcttcgatcaactcgctatcgaggcataccagcgaggtgtatgggaggatttaggcaatggctatattacga |
| | | aaaagcccaagccaaaaaccactgaggtaatcatcagcgaggactcatcaccggatgatgccggcaccgttcgtcttaaaatcggc |
| | | gtggctaatgcaggtaacagcccacgcattcattatgctgaagatgacgaagttaccgaaagcagcccagtacttagtgataacac |
| | | gctagcaaccaaagcattgcgagtgcagtttttggcagtagaccctaccggtaaaaaccttactggaaacccaaccacctggaaaa |
| | | atcgactgacattacgcaatcgctttgacgaagtggcgagaacagtcgaattgttcgttgccccccgtggcacaatcaagtacacc |
| | | ctagatggttcagaagcacgtaatggtgaaacctacaccgtgccaatccagctcgctgatcaggaagccactatctatgtctttgc |
| | | tgaatgtgatggcttagaagagaagcgaaatttcacctttgcggcagcaggttctaaagaaataccgatcataaaagataagcccg |
| | | ccactctggtcagcccctcacccaaacgtatggatagctcggcaaaaacctacgagggtttgaaaatcgccaaagagaaaggcatt |
| | | gagttcgagcagattagcttaatggttggatctgcaccaaaggtgattcatatatcgctaggtgagatgaaaatcagcgccgaatt |
| | | cattgaaaccgtattaacgcacttgcaaaccgtgttaagtccagaagcccctgtggtcatgaccttcaaaaaagcctacacacaga |
| | | ctgggcatgatcttgagcaatttgttaagcagcttggcattgaaatcggtaatggcgaggtggaacaacgatgaataaaaccgttg |
| | | attttggggcaccgtcagaattcggtatgcatcacttctatgtggagattcccgcagcgccccgtgacgctgttgtgatctatgaa |
| | | gactatggctttgacggtgaagattctcgccgagaaacagtagagtgtcgcctgatattagccagagagctctggactaagatccg |
| | | cgatgacgttcgccgtgactttaacgctcgcctaaagattaagaaacaaagctccggtacttggtctaccggtaaagtgaagcttg |
| | | accgctttcttggacgtgagttgtgcgttcttggctgggcagcagaacatgcctcacccgatgaatgtctggttatttgccaaaag |
| | | tggctggctttacgcccagaagaaagatggtggctttacagtaaaaccgcagctgaagcaggtcgtgatgatcaaacacaacgagg |
| | | ctggcgtaaagcgctctattgcgcgctatcggatggagccaatatcaaattggaaaccaaaaagaagcccaagtctaaaaagctac |
| | | aagttgaagatgagacccaggatctgtttgggtttatggaaaagggagagttttgatggccttgcaaccgtttgaatggagagaca |
| | | aaccgtctcttattgagcacctgttcccggtacaaaaaatatctgccgagacctttaaagaacgaatggcaagccacggtcagttg |
| | | ctggtgtcgttgggtgctttttggaaaggcagaaaacctctcatcttaaacaaagcgtgcattctgggctcattgttaccagcaac |
| | | tgacaacccgcttgaagatttagaggtatttgagctgttaatgggcatcgactctgagtcaatgcaaaagagaattgaggcttcac |
| | | taccagcatcaaaacaagaaacaatcggcgattacttggtattaccctatgccgaacaaatcaggattgctaagcgcccggaagaa |
| | | attgatgaatctcttttcgtccatatttggaatcgggtcaacaatcatcttggtacttctgctcacacttttgcgcaactagttga |
| | | ggaactaggtgttgcacggtttggccataggccaagagtggcagatgtattttctggttcgggtcaaattccgtttgaggctgctc |
| | | gcttaggttgcgatgtctatgcctctgacttaaacccgatctcctgcatgcttacttggggcgctttgaacgttgttggtgcgagc |
| | | gcgcaaaaaagagtagaaatagacaaagcccaacgggatatcgttaagaaagttcaaaaagagattgatgagcttgacattgagtc |
| | | cgatggccgaggatggcgagcaaaggtattcctatactgcgttgaggtgacctgccctgaatccggttggcgtgtgcctttaattc |
| | | caagtttgattatcagcaatagttttcgagttgttgctgagcttaagcccgttcctgctgagaggcgatatgatattagtatccgt |
| | | gaagtatcgactgatgaggaactggagttctataaatcaggcaccatacaagatggcgaggtaattcactcgccagatggaaaaac |
| | | tcagtatcgcgttaatatcaaaacaattcgcggtgactataaagaaggcaaggagaacctaaacaagctgcgaatgtgggagaaaa |
| | | cagactttgctcctcgtcctgacgatatttttcaggatagattattttgcgttcaatggatgaaaaaaaaacctaaaggatcgcag |
| | | tattactacgaatttcgtactgtaaccaatgacgacttaaaacgcgaaaaaaaggtaatagaacatgtcgcatccaaattagatga |
| | | ctggcagaagcaaggtcttgttcctgatatggttattgaagcgggcgataaaacggatgagccaatcaggacgcgaggctggactc |
| | | attggcaccatttattccatccaaggcagttgctatttttgagcttggtgaacaaatattcactcgcagaaggaaaatttaacttc |
| | | ttgcagtgcatgaatcacttgtccaagctaactcgctggcgaccccaggccggtggtggtggcggttctgcggctacatttgataa |
| | | tcaggcgctcaatactctgtacaactacccagttagagcaacaggatctatcgaaaatatcttggctgctcagcacaaccactgtg |
| | | gaatcagcgagaatgtttcctttgtggttaattcacatccagcgccagagttagatgtggaaaacgacatttatattactgatccc |
| | | ccatatggcgatgctgtcaagtatgaagaaatcacagagttctttattgcctggctgaggaaaaatccgccgaaggaatttgccca |
| | | ctggacttgggatagtcgccgatctcttgcggtaaaaggagaagatgagggtttccgtacaggcatggttgctgcttatcgcaaga |
| | | tggcgcagaagatgccagacaatggtttacaggtgctaatgtttacccatcaaagtggcgctatctgggcagacatggctaatatc |
| | | atttgggcgagcggccttcaagttactgccgcatggtacgtagttactgaaactgactctgcattacgtggtggttctaacgtaaa |
| | | aggcaccatcatcctcattttacgcaagcgccatcaggcattagagaccttccgcgatgatttaggttgggaaatcgaagaagccg |
| | | ttaaagagcaagtcgaatcgttaatcggattggataagaaggttcgttcccaaggcgcggaaggcctctacaccgacgctgacctg |
| | | caaatggctggttacgcagccgcgttgaaagtactgacagcttattcccgtatcgacggtaaagacatggtgactgaagccgaggc |
| | | accacgccaaaaaggcaaaaaaacttttgttgatgagttaattgatttcgccgtgcaaacggcagttcagtttttggtgccggttg |
| | | gcttcgagaaaagcgaatggcagaagcttcaagcggttgaacgcttctatctgaaaatggccgaaatggaacaccagggtgcaaaa |
| | | accttggataactatcagaacttcgccaaggcgttcaaggttcaccattttgatcaattgatgagtgatgcctcaaaggctaactc |
| | | tgctcggctaaagctttctaccgagttcagaagtaccatgatgtcaggtgatgccgaaatgactggcactcctctgcgagcccttc |
| | | tttatgccttatttgagatatcgaaagaagttgaagtagacgatgttcttttgcatctcatggaaaactgcccgaattacctgccc |
| | | aataagcaactgcttgccaaaatggcggattacctggctgaaaagcgtgaaggtctaaaaggtaccaaaacgttcaaccctgagca |
| | | ggaagcaagcagcgcgcgtgtccttgcggaagccattcgaaaccagaggttgtaatctatggcgattaagcgcttttcatcccgca |
| | | cagaaagattagatacggaattcctcgctgaatcgttgaaaggggctgctaagtatttccggattgcgggttatttcaggagctcc |
| | | atctttgagcttgtaggcgaagagattgcaaagattccagaagttaagatcatctgtaattccgagcttgatctggctgacttcca |
| | | ggtagctactggccggaatacagcactcaaagagcgctggaatgaagtggatgtagaagctgaagcgctactgaaaaaggagcgct |
| | | accagattttggatcagctattacattcgggtaatgttgagattcgcgtagtccctagggagcggttattccttcacggcaaagca |
| | | ggctcaattcattatgcagatggcagccgtaaatcttttattggctcagtgaatgaatctaaaagcgcattcgctcacaattatga |
| | | gcttgtttggcaagacgatgatgaagaaagtgcggactgggtagaaagagaattttgggcactctggactgaaggcgtcccgctgc |
| | | ctgatgcgatcttagctgaaatccaccgtgtatctaatcgccgggaagtaaccgttgatgtattgaaaccagaggaagtcccagcg |
| | | gcggccatggcagaagcacctatctaccgtggaggggagcagttacagccctggcaacgctcgtttgtgactatgtttctggaaca |
| | | tagggagatctatggcaaggctcgcctactattggctgacgaggtgggtgttggtaaaacgctatcaatggcaaccagtgcattag |
| | | tcagtgctttactagacgatggacctgttttgattctggcaccttctacactcacgattcagtggcaaattgagatgatggacaag |
| | | ctcggtgtgcctgctgcggtttggtcctcgcagaagaaagtttggctgggtgtagaggggcaaatactctcacctcgaggtgatgc |
| | | ctcctctatcaaaaaatgcccttatcgaattgccattatctctaccggactgattatgcatcagcgggagaagactgactttgtta |
| | | aagaagctggaatgcttctgaagaatcgtttcggtaccgttattctggatgaggcgcataaagcccgtattcgtggaggattagga |
| | | gatcaagcttcagaacctaataatctcatggccttcatgctgcagatcggcaggcgtacacggcatctggtactgggtactgcgac |
| | | acctattcaaaccaacgtacgtgagttatgggatttattgggtattttgaactctggtgctgaatttgtactaggcgatgctctgt |
| | | cgccatggcatgaccatgaacaagcgattccgttgataaccggccagactcaggtgacatctgaggctgaagtttggcattggtta |
| | | agcaaccccctgccgccaagcaatgagcaccatactgttcagcaaattcgtgactacctgtccattgataataagtcctttggata |
| | | ttctcatcgtttcgaagatctcgactatatgattcagagtctttggctctccgaatgcatgacacctagcttctttaaagagaaca |
| | | accctatcctacgccatacagtgctgcgtaagcgtaaacagctggaagatgacggtctgttagagcgtgttggggtgaatacacat |
| | | cccattaagcgcaacctagctcagtatcagtcgcggtttgtggggcttggcattccgaccaatacaccattccaggtcgcttacga |
| | | aaaagcggaagagttcagtaagttgcttcagtcacgcactcgagccgcaggcttcatgaaatctttgatgttgcaacggatctgct |
| | | caagtttcgcatcaggcttaaaaactgctcaaaagatgttgaaacatacggtttctgacgaagacgaggatctagttgaagatgtt |
| | | gagcacttactttcagaaatgactcctgcggaggtcgcttgtttaagagagattgaaacacaactgtcacgccccgaagccgttga |
| | | ctcaaaactgaacacagtgaaatggttcttaacggaattccgtaccgatggaaaaacttggctggaacacggctgtattattttca |
| | | gccagtattacgacacggcggagtggatagcgaaagaactggccaagtccttaaaaggcgaagtggtagccgtttatgctggcgtt |
| | | ggtaaaagcggcttattcaggggcgaacagtttaataacgttgaacgcgaattgattaaatccgcagtgaagacgcgcgagattct |
| | | attagtggttgctacggatgccgcctgtgaaggcttaaacctgcaaaccttgggaacactcatcaatgtcgaccttccctggaacc |
| | | catctcgtttagagcagcgcctcgggcgaatcaaacgttttggtcagacacgtaagtttgtggatatgctcaatcttgtgtacagc |
| | | gaaacacaagacgagaaagtttataacgtgctgtcggaacgcttacgcgatacatacgacattttcggcagccttcccgatacgat |
| | | tgatgatgaatggatcgacaacgaggaagaactcaacactcgcatggatgaatacatgcatgaacgaaagaaagctcaagatgcgt |
| | | tctccgttaagtatcgcggtactctcgatcctgatgctcatctctgggaacgttgcgctacagtactgtcacgtagggacattgta |
| | | agtaagctcagcgaaccatggggaagctaattatgttgtgatgtggatgccccgctcagccaaggtcctgcacaactatgttggat |
| | | gctcttttttagagggctacatcatgaattcgatcaaagttattggtacaattctgagtaaatctgtctctcagggtatccatttc |
| | | gagtg (SEQ ID NO: 73) |
| 77 | pLG079 | gccagtcgcttgcaaagtattgagaattgatgtttatttgtgttttgaggtggtctttgaaaccaattttcgttgtcaggtcgagt |
| | | attgggtgcagcagacgctattcaaacattccgtcccggttatccgaaggtttccggctcggtagaaggcctgaagcatgtctctg |
| | | gttttgaagacggttcgggcttttccgagaggtcggactaccgaagaattgcttgttctcgtcggtgcggctttctcaaatgacaa |
| | | gcggcttgcggctctcagcgaactggagacgctatttcgcgatggtttgatagtgaaaggcaaggacggtcgctggcgtgcaaagg |
| | | cagatggtttcaaacccagacatgagagcgtgtcggcttcgagaggtggagggcctgagggcttcgttgatgtcattcacgctgcc |
| | | aatgcattcttctcctcggaaccgacggcggccgaactacctgatcaagaagacgaaagttcagatgctcccgatccgcaagcgct |
| | | actgagatattggcgctcggccttgcgtgccgatccacgaggagccacgacccaggttctcgacaaacatggaatcgagtgggcct |
| | | tgatctctgggcgtggccctatcggtccagaagaagggcaaacgctgactgtttcaatcgaactcgacgcgattgatcctgccttt |
| | | cgagaggctctggtgcgaagggaaggtcacgagaacgcgcttgcagtgggttggccgatggcggtcggacgacgtggcggagttcc |
| | | tgtctttcgacccgttggcatgttagcagcagcttgggatcgtaaggatgaccgtctaatcctgacgattgatgccgatgacgttt |
| | | tggtaaaccctgattgggtcaaaagtgccgctcgtgccagcggctggaagcgcgacgacctcgctgacctttttttcgtggacgat |
| | | gggctggggctgcgggctcaggattttgtggagaaggtaaggattgccgttgccagtcagatacgtggtcgcgttgtcggcgagaa |
| | | tctcgccacacagctcgatgcctcggctcaagggatttttgacagcgccgcgatcttcctaccgactgactcttctttcaccgcgg |
| | | gggctgctcgtgacctggatgccattgcgacatggccgaaggaccgccttgagagaactgcgcttggcgcggtattcgggtttgac |
| | | cttcaagacggcacggacaaggctgctgcaatcgacgcagttccgctgaacaaggaacagttgcgcgcggttcgatccgcatgcca |
| | | agcgcctttgaccgtcgtgaccggtccgcccgggactggcaaaagccaagcgatcgtatctatggccgcgtcagtgctcgcagatg |
| | | gtggcagtgttctcgtcgcctccaagaaccatcaagcgcttgatgctgtggaggaccgtcttggctctcttgctccggacgtccca |
| | | ttcgccatccggacactgaacccgaatgacgaggcggatacgggcttcaaggacgccctcaaacaactcatcgacagcgaaaatgt |
| | | gacgcgcaacgcatctgtcgacgaattcgcattaggcgagctcaaaagcgacgcgatcgcgagaagcgaagtggttagcgtgatcg |
| | | ataagatcacggaaacggaatgcgaaatttccgatattctggaccggattcaagtccgagaggatcgcgggcgccctgacaaccaa |
| | | gactctgaagacgtggatccgagacaaagtctcttactccgctttgtctcttggtttggatcgcttttcgccaagcgtccccccaa |
| | | agtagcgccagtgacagatcattcttcgtcccgccgcggaatgaacgtcaaagagcttcattgcgcgctggcagaaaaaagatatg |
| | | aacgcgatgcgctcgggacacctgacgatccgatcgccttaggcgagaagatccgggaagcgaccgagaatcttctgcctcgcatt |
| | | ctgtccgcccggacacatctcccagaggatgagaggcgcgaaatcgcagaactctacgatgactggacattcgacgggggacgggg |
| | | acatccccctactgatctttcgcgcgtcctcatttcgcatcggcctttgtggcttgcatcgatcttgggcacgcctcgacgcatac |
| | | ctcttgatgacgggctgtttgacctcgtgatcttcgacgaggcgagccaatgcgacatcgcgacggccgttccgttgctggcgcgc |
| | | gcgaagcgggccgtcgttgttggggatgatcgacaactgtcattcatccctcaactgggtcaggcgcaggatcgcaatctcatgca |
| | | ggctcagggcctaccggtcgccagaatgggccgtttcgcccagagtcgccgttcgctattcgatttcgcatcgcgcgtgtctgttg |
| | | ccgacaacaggattactctgaggcaccagtatcgttcagcaggccccatcgtcgattacatcagcgagaacttctacggaaaccag |
| | | ttgcagacctcgtatgacccgaggcgactgaacgtgccagatggggtgcgccctggcctcgcatgggaacatgttcctgctcccgc |
| | | ggtcccgcaaatgggcaacgtcaatccgtcggaagtaagcgcgattgttaggcacctgaaaaagctgatcgttgaagacaaataca |
| | | ctggcagcatcggtgtcataacgccgtttcgcgctcaagtggccgctatcgagaacgcggtcgatgccgtcctggatgaaccgaag |
| | | cgcattgcctgcgagctcaaggttggcacagttgacggttttcagggacaggagcgggatctcatcatgttctcgccttgcgtcgg |
| | | tccacgcagcccgcagtctggcttgaccttctttcagcgagatacgcgccgtttgaacgttgcgatttcgcgggctcgggcggtcg |
| | | cgatgatcttcggcgatcttgattttgcacgttcagggcaatcaaaagcgctggccaagctcgcttcgagggcgacggaagcgcgg |
| | | acgaaacggggcgaaggtgtgttcgacagcgattgggaacgcaaagtctatcacgctctgaaggcccgaggtctggatccgcagcc |
| | | gcagcacgaaatagctgggcggaggctggacttcgcgttgtttggagcgaatgatgtaaagctcgatctcgaggtcgacggacgca |
| | | gatggcacgaaagcccagacggtcgtcgaaagacgtcagacctgtggcgcgatcatcaactgaagtccatgggatggcgggtgcgc |
| | | cggttctgggtggacgaactttcaagggatatggagggttgtcttgaccgagtcgaacaagacctatcgtaagtcgagcaggaaca |
| | | ccgcggttgcgttggggctgggtggcgccgccatccttgcctcgggctttctcgtcctgcaagtcaactcgctcgatcgccgatat |
| | | ggtcgtatcgaggaaaatctgagctactacaccggggaactccaatccgcgcagcagcaactggcttttgctcgtgagcagtttcg |
| | | cgaactttctgaccaaaagcaaagcttgtctcaggaagtcgcgagcgccgaacgcagccttcaaagcgcggctcagagagaggcgg |
| | | atgcgcaggctagtgtcgaagcaagccaggccaaattgactgctgagcgggaccgtttggccgaagcccaaaaaacgattgcggat |
| | | gcgcagcgaattgaacgtgaaactgctcaagctttgctgcgaagaaatggcctcgaaacagaggtggtcaaactgaaaggcgatgt |
| | | gcaggcccttaaggagagccagcaagagttgtctgctggtgttgaccaaacgcaatcggctgtcgatcgcctcgaagagagaagag |
| | | ctgaacttcaacgtgaagtggatagactcgcgcccgccgttgaagaccttcgtgcacaggagcggcttgtcgaacaactgcgaggt |
| | | gacgaggatcgtctcgaacagagcctcgacgatttgaatgcgaacattgcaattgcacggactgaattggcgaccagcgcggaaaa |
| | | ggtcgatgcggccgaggagaggctgcgtgcagggcaggaacaaatagcatccacagaagctcaacttgaaacactgaatttcgaag |
| | | tcgatgacctcgagtcgagacagggcgaactgcaggcaagtgtctcgggagcagagacgcgtctttcttcattgcaaaatgaactg |
| | | gagatcgcacagaacgcggtgacgcgagctgatgcgcagcgcgctgaaactacagaagcactcaacatcgctcaggaacagttttc |
| | | gacgcgaagcgctcagctctctaccctccagtcgcagattgcatcggcagaggaagagcttgccgaacttgaagagagacgggcgg |
| | | aattcagcagattgcaggctcaaatggaccagctgcaagcacgtcgaacgacactagaggaggttctccccgatcttgagaagcga |
| | | gttcaagcagagcgggctaatttgggttctatcacgacagaagtggagacagagctcgggcgagttgctgtactcaaaggccaggg |
| | | ttccagtctggaggccgacatcgagcgcctccaagagcgtcgcgacgaactcgggctggaaacgcagtccgccactgctgaggcgg |
| | | aggccgcgcgcgcatcccttcaagctgagcttggtcaacttgcggaaaccgatgccctttcaagagcgcggactgccgatttgagg |
| | | cgcttgagagaagctcttggagctgctgaaagagagctttccgaacttgaagagagacgggcggaattcagcagattgcaggctca |
| | | aatagaccagctgcaagcacgtcgaacgacactagaggaggttctccccgaacttgagaagcgagttcaagcagagcgggctaatt |
| | | tgggttctatcacgacagaagtggaaacagagctcgggcgagttgctgaactcaaaggccagggttccagtctggaagccgacatc |
| | | gagcgcctccaagagcgtcgcgacgaactcgggctggaaacgcagtccgccactgctgaggcggaggccgcgcgcgcatcccttca |
| | | agctgagcttggtcaacttgcggaaaccgatgccctttcaagagcgcggactgccgatttgaggcgcttgagagaagctcttgctg |
| | | ctgccgatgatgagctttccgagacacgagcggaactgatggacggacagtctgtggaacaggaaccagtatcaaccattagtgaa |
| | | ggcgctggcgcccgtgaaaacgctcagtctgacaactccgcgccatcgagcaccgacaattgaggtaaccgaaaatgcttacggac |
| | | aatacaatacttgtgctggcgattgcgggtgtcctgatactgctcgccgtggttcaactttttctggccgcccgccacgaccgggc |
| | | ggttacggcagcaggcccgatcgaagagcttgccgtctacgagaagcggctggaagaaaaacagcggctcatggacgatcttgaag |
| | | ctgaagtggaaaaacgtcgggaggcaatggccgtcgttactgacctccgggctgaggtcgacggtctacggcgtcagaaggaggag |
| | | ctccttacagaatgggagagtctccgtgaacgtcgcgacgaagttgcggcagttcgcaaggagactgaggacgccgttgtcgaacg |
| | | ccagcaactcgaaacggagatcgccccgcttcgtgcggagtatctggagataaaggaaaggctggaaaaggcggaggagctcattg |
| | | agcgcactgacgccttgagacgagagcacgacgaaatctccacacaggtcaaagatcttcgggacaagaagaggcaacttgaagag |
| | | gccgaggaacgggtttctcgcctggaagagcgttccttcgaacttgagacatcgaatgctcggcttgagggacagaagtcttcgca |
| | | tgaaagcgagttgtccgccttggaagcgcggatcgcctcggaacacggtgggttggcatctgcccaaaccgaacatgctcgcctcg |
| | | atgcagaggttgcggctctgaaccaggaaacccgccgctccaggggcgaaatcgagacgctccaggacactcgaagcgcgcttgat |
| | | gctcgattggcacacctcaaggccgagatagctcgccgagaaggtcgaaccgtcgacggggaaaccggcgaaacggatccgcttcg |
| | | cgagctcaatgaaacaccaccggtcattacggagatgaggacctgggacaacgcgccccgcgagaacgaggcggatgccatcaaac |
| | | gcgtcgaacgccgcctacgcgcaaagggtctcgactacccggctcgcacgcttcgcgcttttcacaccgccatgaaagtaaatgaa |
| | | acaacgcagatggcggtccttgccggtatttccggaacgggcaagagccagctcccgcgtcaatacgcggccggtatgggcatcgg |
| | | tttcttgcaagttccggtgcagccacgttgggatagtcctcaggatctgatgggattttacaactacatcgaaggcaagttccgac |
| | | ccacagacatggcgcgtgcgctttgggcggtcgacgggcttaacaacgacgatgcggaacaggatcgcatgatgatgatcctgctg |
| | | gacgagatgaacctcgcaagggtcgaatactatttctcggacttcctcagcaggctggaaagccgtccgcgtcccgatgacgtcga |
| | | caatgaaaacgaacgcaaggacgctgtgatcgagcttgaaatcccgaacatggaacgcccccccaggatttttccgggctacaacc |
| | | tcttgtttgcgggcactatgaacgaggacgaaagcacgcagtcgctatccgataaagttgtcgaccgtgcgaatatccttcgtttt |
| | | tccgccccgaagaaaatcaaggacggacaggcagaaggaacggtcgagccgattttggccctttcgcaacagacatgggagagctg |
| | | ggggcggtcgagtgcgtctgtcgatggcggtcggcgtgtcaccaaccggattgaacaaatggttgatctgatgcgtgacttcaaac |
| | | ggcctttcggtcatcggctcggacgcgcgatcatggcttacgcggcgaactatcctgaggttgaaggcggccgcggtgtcgacgac |
| | | gctctcgcggatcaattagagatgcgccttctaccgaaactcaggggcgtggaaaccgacatggctggccctcagttctcgaggtt |
| | | gatgacctttgtggaacgcgagctgggggacgacgccttggcccaagcaatcggtgagtcaatgtccctcgccgaggcaaccgggc |
| | | agttcgtatggagtggagtcacgcgttgatgcggtttctggcccgtccctgggcggcgaaagcccttggagaggacgaagcctttg |
| | | ggcccgaagactgtctgatcggtagctaccagggggcgaacccaggcggctacgaatacgtgacgctcttgaggggaaacgtccga |
| | | ggtagcgataccggaactgttctgtttccctatccaaagcgtgaggaagctgtcgggcccgcgcgtaagggcttcccggtgcgccc |
| | | aaggtcggggcacgatcctgccactccggacgaagaagaaggcgcagaggcccttcgacacatgaacgaagttcttgcacgtatcc |
| | | aagaactggaaggtgcgattgaagacccaagcgatacatgggggcgcctgagggatgcttggaagcgcgccgaaaatgaagccgaa |
| | | cccaaaatggctgaaatcgtccggcaggcgcggggcatgcttccggtgcttcgcgatctggaaaaacgcatccgccgggttctacg |
| | | taggcacagggagctaactccccttgatcgggtgcaggagatggatcggacctctatggtgtggctcagccgacagccagggcgaa |
| | | gcatcgcggaacgtgcaggttcttcgcaacgaattcttgcgacggttcgccgtgagaatttcgatacgctcgagaaccgtgtcctg |
| | | catgcctacacgcgtcttgccgcagatgttgcacgcgaatggacccgtgagcaccctcgtgcgaaggacagtgttcgctacaaaca |
| | | ggttgaggcttttaggaaggcctgtcgagtattgtcgcgaacactcagtgacctcggtgtcatgatcgcgtcggccggcgtccagc |
| | | caaactatgtgctcatgcaagatcgcagctatcgagaggttcatgagggatggctgaggcttctcttacgccgaaaaattgtagat |
| | | gatctttgggcttggcaggccgaaacttggacggatttctccgttctttcgatcattcttgccatcgacgaattggaagaggctga |
| | | acttgtcgctcagtcgccgatttcgtggagcggtgaggcaacaggcggacgctggttcaatcaggatcggccaatcgccgtctttt |
| | | ggctgcgcgacaccaaccgcattgttgaagtccaagcacgccctgagcgaccaggaaccatgttgagcgcggcacaagcgcacgtc |
| | | gccctcagaatttccgatcccaaacgggctgaccttccgcgcaggatcgctgtctggacgccacatgccatgcgtagaattgatct |
| | | cgaggatactgtgcggggggcagttcaactgcttcaccaaatccagcccctcgctcagacggaagttttgcggaatgggttgatca |
| | | tgaccccagcacgtggtgtcgcagctgaagagagcgcaactcacggaagagcgatcgttacggcaatcgccataggcccagccggt |
| | | gaagacctagcgaagggattccaggccgtgcgcgacttcattcgcagtgagctatacgaggtcgcaacatgatcgaccgaaaacta |
| | | tgcggcttcgatctcaacggatggagagatttcgttgcgaagaactggcgctccgtgccaggtgaagacgaggtcattggtccgac |
| | | cgatatcgtcacaagtggccctctttcgtcgatcgtgcggatcggggaaagccgcctcgcaggttggatcggaggaccgcaggctg |
| | | acattgctccgcacggtcgcggtggtggttggggtgatgtcgggtcagaacaaagacgcattcccgttcggtcactgctggaaatg |
| | | cgtgatgacggggtcgaaaaactcgcccaggcacttgtgggatctgcgagcggttcggcaaacacagtcgtttcgatcgatgaggg |
| | | cccggatggcgatgaagccgtccaagagcaccttctcgaagcacttgcccgagggaagttccgaaatggctcattggtttggcgac |
| | | cagttcttgccgccttgttcgccattcatcgcgatcaggtttcggaggggcagcttgtaggcgtcgtctcccatcagcgccaaggc |
| | | ttgtcagttcaaaagctgcgtattcgtagcgcaaggaatgtgctcgccccggagcgacgcgaggccgctgcccatataccgtgcga |
| | | cgctggttacgagtccctattccgaggtgcccgcaacgccgctgtcggggcagagggtttttcggcgcgcacagctcatcgtgcga |
| | | tcgcaagctcggtcggaaaagctggtttagggatggattgcaatcctgagatgctccgcatgcccaacggcgattgggagctcttg |
| | | gaccttaataaatttgacgcgtcggaagtggtgagtgtcccgagttccgagctcgatctggccgattgcgacgtcgttcttttcga |
| | | gaccctttgtgaaggtcggctcaaaaaatgcctgagtgatgctatccaaagagcagctccagtcgaggtgctctctcttcccgcaa |
| | | cggctgttgcggaaggtgccttggaagcagcacgccgagccggggacggggaaccgatcttcttcgactttctaccacgattgtcc |
| | | accatcgtgttcggatcggatggcgcaaagaatttcgatctcatacggaaagaagaaacgctcgaagcaggccggacctacagaag |
| | | ccctgaagcagcatctctcgcgataccggcagggcaggagagcgtctctgtctacctgaggaaagaggaagctccctggcctcgaa |
| | | aggcaagggtgtcgcttggagctcctctgaagcatcaagctgccgtctcgctgtgggtcgaacagaaaccggccgccgggcgagcg |
| | | cggatcctcatggaatcgccggacttggggcggaatttcgcggtggattgggatgaagcactggaagaggaacggccctggtctga |
| | | gatcatcgagagcttggatacgcaagtgtcaattcccaaacgtctggttcttccctgcggcatggaggcatggcatgacagcgatc |
| | | gatccgcaggtatgctaactttgctcgaatccgagcctaatcgcagccgcacggattgggcgacccttcggcaaaaactttcacag |
| | | cgtccctttggcaaatactgcatctcaagtgacggcgacgtgcctccggagatcgcggcagaaaccctcgagcggtttgaaattct |
| | | gaccagcaaagcgcttgaggttactgaaaagcgcctgaggggcgaaagcggctacggaacggaagacaatgaggctctcaaattct |
| | | tgagttggcagttccgccgatgcccgcgcgatgtcgcgacgtggctgatggactgtattgaagcgtccgggcgcaaccatccgttc |
| | | gtcaaacatcaagcaagttgggttctcgtatatcagggccttggccgcatcgtcggaaacgaagaggacgaagcgagagcaatgcg |
| | | gttgcttctgacttcgtccattgaggactgggtctggaaccgacaaagcgcggccatggcgttcatgctgtctcgttctgacagcg |
| | | ctccatcttacctggaacgagaagacgtagagaagctgaccaagaggactatcgcggacttccaacgtaatatcggcggccaatat |
| | | acaatgtttaactacgcgcctttcttacttgcaggcctgataagatggcgtctcgttgatcctaaagctttggtgatcggggccga |
| | | cccgttggcggatgacctcttggctatcattgagaaaacagagcacgacctgaaggcccgttgtgggtccaatatgaatttccaaa |
| | | ggcggcggtcgaagttcttgcctatcctccaagacctgaagtcagagctggcgggagaaggttcgaatcctgacctgttgttggat |
| | | atctatggagcgagcggaacgtgaccatgagcgcgcaggtaccaagctgctggatcaagcctctgggacgagcagaagcccgtccg |
| | | ttgtataaaatcaccacagacacaagcaagagatatcgtgatactaaagcgctctggaggattcccatcagacctgatgaacatcg |
| | | caactgcatcgaaccagaaccatcttggcaactaggtgcggaccaaggactgaagcatgtgcctatcgctcaa |
| | | (SEQ ID NO: 74) |
| 78 | pLG080 | gggctgtttggttgaattaaaaatacgaactaaaaccaacaagagtcggaaaaaacttcaaaatgctgcttatggataatagtcatc |
| | | ttaaaaatgtacggaaaaagagactaaaatcagaaaaacatctgttatacattgacttaaagtcatcatctccgctatgagtcctca |
| | | atccaagttgacaaatgtttagccaggagttcccgtgaacgagcatctctctcatatggatgtacataccttgtttgaagaaatgga |
| | | cgagcaggctgatggaataacgtttaaatactcatttgatgacatagcaaagagcaacgcattggttgtcactgagtttgtcaattt |
| | | tgagcgtgacagcacggtagctttactcgccagccttcttactctcccggcacaccaatctcagtgtttgcgctttgagcttctgac |
| | | gagccttgcactaattcactgcaaaggtcagcagatagcaaatatcgatgacgtgaaacgctggtatgtcactattggggagtcgag |
| | | tagtatcgttggagaagatcctgctgaggacgtcttcgtcgcccttgttgataataaaaaaggtgattaccgtgtgctagagggggt |
| | | ttgggaggcggcaggtttttatacacaattaatggtcgaaattgtatccgacatgccggatacgcaccgctatcgctcgctgaaact |
| | | tgctatacaggcaattctccgtctctcagatgtcatttgtgctcgctctggcctttatcgttttcaggaaggcgcagacgaattccc |
| | | tgactctcttgacaccgctggtcttgatgagaaaacgctctgttcaagggtaacgttgtccgagcgttctcttcgagctgaggggat |
| | | caaacttgctgacttagcacctttcattcttgaaccttctcatataagtatgcttggaaatcaggtccctggggagggaatgcttga |
| | | acaacggccattgctccgcacacgcgatggtattgtggttgtacttcctaccgccatgaccattgcacttcgccaggcagtgataac |
| | | atttgcaaagcgcacagaagaattgagcgagctagacaaagcgttagctaacgtctacagccttactttctccgagatgccggtctt |
| | | cggtaatggaggaaggttaagaagactgacatgggagaagtacaaaatgagccgaacaacgatggtaacctccatcgtggatgctgg |
| | | tcatttgatggtacttcagttcgttttgccttccatacagcaatatgccgataccggtttcaacaacttgctacagctagatgaaga |
| | | gaccacgcaatttctagataactctgttgaacaaattacagttgacctcgccaaacaacccggctttcagcgtggcatcgtcgtgcg |
| | | cattgcatgtgggtggggggcgggttttatgggggtccctccccaactgccagatggttggggatttgaatggatgtctggtgcgga |
| | | ctttgtccggttcggggcattacccgatatgtcaccaattgccttctggcgtgtgcaagacgcagtcgaaacgatcaggcaagctgg |
| | | tgttcgattaatcaatatgagcggaactctcaatcttcttgggtggatacgtgccaatgatggccatatggttcctcatgaccagtt |
| | | accagatgaccgtatcacaccggaacacccgctaatgttaatgattcccacgaatttactccgtggtatacgaatagcggcagacac |
| | | aggatatgaccggcatcgcattagtgacaacaatggtaaatggcatcgagtgatgaggccttcggcagaagatttctttcccaccga |
| | | gcgtcagagcaagtgctacgcatcaattgatgatcttgaagcgcaacggctgacctgtgtatatgaggggcagggtaatctttggg |
| | | taacgctcgaagctccagaaatggaagattggatgctcctcgttgagcttgccaaaatggttcgaacatggattgggcggattggc |
| | | gaggcactggaggtcttgagtgagcaaccaataaaaaaatcattaaaggtgtatctgcattttgatggtaacgacaatatcggcag |
| | | atttgatggtgagaatttttctgatgatatgaatacattttggcgacttgaacgaatccatgagcatggggcgattcgtgtggttc |
| | | ttcaagatgggtatcttgcaggttttcgtctaccggataaccgtgcagaacgagctctggtgcgcgcactcggtacggcgtttgcc |
| | | acacttcttcggatgaaagagccagtagacaaaggggtcactgttgagcagatagcggtgcccaatgacagagcgcgcagcttcca |
| | | cataatgcaggcttatgacttcaaccaatatttaggccgttcactaactaaacgtcttttagctattgaagatatcgactcagccg |
| | | cagcccgaattgagctagcatggcgtgctgtttcgacagatgcaccatcacgatatcagggtaaaaaggaagttggaaagctcctt |
| | | aatgatgtggttgatgtgctgatccaagacttactaagcgaactttcaagatttgaccgtaaacagacagtaatgcgattacttga |
| | | aaacgttgtaaaggcacgttgtgaagaggcgcactggcgtagtactgcagcagcggtccttggcttgcatgcaggagaagagggtg |
| | | tcgaagagacgatagctcaagaaatgagccgttatgcgggcgcagcgttaacttcccggctaatcattgaacttgccatctgtgtg |
| | | tgcccgacaagcggtggaattgaaccttctgatatggcactcagtaaacttcttgcacgggcatcactgctttttcgcataggtgg |
| | | tatgtcagatgccgtacgtttcggtgctttgcctgctgatattcgcatctcccccttaggtgatctcctctttcgcgatgaactcg |
| | | gcaaaatggtgcttgaaccaatgctttcaaaagttactaacgaacggtttgaggaacaagcggcacaattcgagcaacactatgtg |
| | | aaaactgccggaggggatgatgagaatagcaaacaagatagtgttgcggctgaaaccaccgaggaccaaaccgatattttccttgc |
| | | attctggaaagcagaaatgggcttcactctcgaggatggaatgcgatttatccagttccttgagtccatcggaatagagcaagaat |
| | | cagcaatcttcgagatgcgaagaagccaattagcggatgctgctaaatcggctgggctcgcagatgaaactattgatgcgttcctc |
| | | aaccagtttatccttagcgcgcgtccgaaatgggatgtagtgcccgatggatttgacctttctgatatatatccctggaggtttgg |
| | | ccgacgcctttcagttgctgtacgtcccttgttacagattgaagagagtcacgatccactaattgttatcgcaccaggactcttga |
| | | atctgtcccttaaatacgttttcgatggcgcatacactgggcaatttaagcgtgacttctttcgcacagagggtatgagagacact |
| | | tggttaggtggagcgcgggaaggacacacattcgaaaaaactttggagagagaacttcgtgaaataggctggacagttcgacgtgg |
| | | cataggctttcctgaaattcttcgcaggaatctaccaggtgatccgggggatattgatcttcttgcctggcgctcagaccgcaatc |
| | | aagttctcgttatcgaatgtaaggacctctcacttgctcgtaattactcagaagttgcctcgcaactatctgaatatcaaggtgat |
| | | gacataaagggcaaaccagataaactcaagaaacaccttaaacgcgtattactagccaaagaaaacatcgataattttgccaagtt |
| | | cacttcgatagcgaatcccgagattgtatcgtggctcgttttcagtggagcatctcccattgcctatgctcaatccaagattgagg |
| | | ctttggcaggaactaatgttggccgcccaagtgatcttctgaacttttgatagatatgctgtgcgataagacgccctggcaactaa |
| | | gttaatcgttcctactactgatagttttaaatcaagg (SEQ ID NO: 75) |

### Variants and Mutations

[0113] One or more components of the systems herein may comprise one or more mutations compared to corresponding wildtype counterparts. In some embodiments, the one or more mutations may be in the catalytic domain of an enzyme of a system herein. The mutation(s) may alter (e.g., increase) the activity of the enzyme.

### Polynucleotides and Vectors

[0114] The present disclosure further includes polynucleotides comprising coding sequences of one or more components of the systems. In some embodiments, the present disclosure comprise vectors. The vectors may comprise the polynucleotides with coding sequences of one or more components of the systems. In one aspect, the present disclosure provides cells comprising one or more of the polynucleotides and/or vectors herein.

[0115] A vector refers to a nucleic acid molecule capable of transporting another nucleic acid to which it has been linked. A vector may be a replicon, such as a plasmid, phage, or cosmid, into which another DNA segment may be inserted so as to bring about the replication of the inserted segment. Generally, a vector is capable of replication when associated with the proper control elements. Examples of vectors include nucleic acid molecules that are single-stranded, double-stranded, or partially double-stranded; nucleic acid molecules that comprise one or more free ends, no free ends (e.g. circular); nucleic acid molecules that comprise DNA, RNA, or both; and other varieties of polynucleotides known in the art. A vector may be a plasmid, e.g., a circular double stranded DNA loop into which additional DNA segments can be inserted, such as by standard molecular cloning techniques.

[0116] Certain vectors may be capable of directing the expression of genes to which they are operatively-linked. Such vectors are referred to herein as “expression vectors.” Common expression vectors of utility in recombinant DNA techniques are often in the form of plasmids. A vector may be a recombinant expression vector that comprises a nucleic acid of the invention in a form suitable for expression of the nucleic acid in a host cell, which means that the recombinant expression vectors include one or more regulatory elements, which may be selected on the basis of the host cells to be used for expression, that is operatively-linked to the nucleic acid sequence to be expressed. As used herein, “operably linked” is intended to mean that the nucleotide sequence of interest is linked to the regulatory element(s) in a manner that allows for expression of the nucleotide sequence (e.g. in an in vitro transcription/translation system or in a host cell when the vector is introduced into the host cell).

[0117] A vector may be a viral vector, wherein virally-derived DNA or RNA sequences are present in the vector for packaging into a virus. Viral vectors also include polynucleotides carried by a virus for transfection into a host cell. Certain vectors are capable of autonomous replication in a host cell into which they are introduced (e.g. bacterial vectors having a bacterial origin of replication and episomal mammalian vectors). Other vectors (e.g., non-episomal mammalian vectors) are integrated into the genome of a host cell upon introduction into the host cell, and thereby are replicated along with the host genome.

[0118] In some embodiments, the polynucleotide herein may be a part of a vector or a pair of vectors that is/are introduced into cells for inducing diversification (e.g., site-specific mutagenesis) of the variable region and/or support replication of the molecules. Non-limiting examples of vectors include plasmids and virus based vectors, including vectors for phage display that may be used to express a diversified variable region sequence. Other non-limiting embodiments are vectors containing variable sequences that have been subjected to the methods of the instant invention and then removed from an operably linked template region, including by preventing the expression of template regions, so as to produce without further diversification quantities of the variable region-encoded protein for uses including as a diagnostic, prognostic, or therapeutic product.

### Regulatory Sequences

[0119] The vectors or polynucleotides may further comprise one or more regulatory sequences. In some cases, the regulatory sequences may direct the expression of the nucleic acids in specific types. The term “operably linked” as used herein refers to linkage of a regulatory sequence to from a DNA sequence such that the regulatory sequence regulates the mediates transcription of the DNA sequence. Regulatory sequences include transcription control sequences, e.g., sequences which control the initiation, elongation and termination of transcription. In some cases, regulatory sequences include those control transcriptions. Examples of such regulatory sequences include promoters, enhancers, operators, repressor, transcription terminator sequences.

[0120] The variable region (or the gene overlapping or including the variable region sequence), the template region, and the coding sequence for reverse transcriptase may be operably linked to the same regulatory sequence (e.g., promoter). Alternatively or additionally, the variable region (or the gene overlapping or including the variable region sequence), the template region, and the coding sequence for reverse transcriptase may be operably linked to different regulatory sequences. In some cases, the variable region (or the gene overlapping or including the variable region sequence) and the template region are operably linked to the same regulatory sequence; and the encoding sequence for reverse transcriptase is operably linked to a different regulatory sequence. In some cases, the template region and the coding sequence for reverse transcriptase are operably linked to the same regulatory sequence; and the variable region (or the gene overlapping or including the variable region sequence) is operably linked to a different regulatory sequence.

### Promoters

[0121] In some examples, the regulatory sequences are promoters. The promoter may be suitable for expressing the component(s) in the systems, e.g., the variable region, the template region, and/or the reverse transcriptase in desired cells. A promoter refers to a nucleic acid sequence that directs the transcription of a operably linked sequence into mRNA. The promoter or promoter region may provide a recognition site for RNA polymerase and the other factors necessary for proper initiation of transcription when a sequence operably linked to a promoter is controlled or driven by the promoter. A promoter may include at least the Core promoter, e.g., a sequence for initiating transcription. The promoter may further at least the Proximal promoter, e.g., a proximal sequence upstream of the gene that tends to contain primary regulatory elements. The promoter may also include the Distal promoter, e.g., the distal sequence upstream of the gene that may contain additional regulatory elements. In some cases, the promoter may be a heterologous promoter, e.g., promoting expression of nucleic acids or proteins in cells that do not normally make the nucleic acids or proteins.

[0122] The promoters may be from about 50 to about 2000 base pairs (bp), from about 100 bp to about 1000 bp, from about 50 bp to about 150 bp, from about 100 bp to about 200 bp, from about 150 bp to about 250 bp, from about 200 bp to about 300 bp, from about 250 bp to about 350 bp, from about 300 bp to about 400 bp, from about 350 bp to about 450 bp, from about 400 bp to about 500 bp, from about 450 bp to about 550 bp, from about 500 bp to about 600 bp, from about 550 bp to about 650 bp, from about 600 bp to about 700 bp, from about 650 bp to about 750 bp, from about 700 bp to about 800 bp, from about 750 bp to about 850 bp, from about 800 bp to about 900 bp, from about 850 bp to about 950 bp, from about 900 bp to about 1000 bp, from about 950 bp to about 1050 bp, from about 1000 bp to about 1100 bp in length.

[0123] The promoters may include sequences that bind to regulatory proteins. In some examples, the regulatory sequences may be sequences that bind to transcription activators. In certain examples, the regulatory sequences may be sequences that bind to transcription repressors.

[0124] In some cases, the promoter may be a constitutive promoter, e.g., U6 and H1 promoters, retroviral Rous sarcoma virus (RSV) LTR promoter, cytomegalovirus (CMV) promoter, SV40 promoter, dihydrofolate reductase promoter, β-actin promoter, phosphoglycerol kinase (PGK) promoter, ubiquitin C, U5 snRNA, U7 snRNA, tRNA promoters or EF1α promoter. In certain cases, the promoter may be a tissue-specific promoter may direct expression primarily in a desired tissue of interest, such as muscle, neuron, bone, skin, blood, specific organs (e.g. liver, pancreas), or particular cell types (e.g. lymphocytes). Examples of tissue-specific promoters include Ick, myogenin, or thy1 promoters. In some embodiments, the promoter may direct expression in a temporal-dependent manner, such as in a cell-cycle dependent or developmental stage-dependent manner, which may or may not also be tissue or cell-type specific.

[0125] In some cases, the promoters may be inducible promoters. The term “inducible promoter”, as used herein, refers to a promoter that, in the absence of an inducer (such as a chemical and/or biological agent), does not direct expression, or directs low levels of expression of an operably linked gene (including cDNA), and, in response to an inducer, its ability to direct expression is enhanced. Examples of inducible promoters include, promoters that respond to heavy metals, to thermal shocks, to hormones, promoters that respond to chemical agents, such as glucose, lactose, galactose or antibiotic (e.g., tetracycline or doxycycline). Examples of inducible promoters also include Drug-inducible promoters, for example tetracycline/doxycycline inducible promoters, tamoxifen-inducible promoters, as well as promoters that depend on a recombination event in order to be active, for example the cre-mediated recombination of loxP sites. Examples of inducible promoters further include physically-inducible promoters, e.g., particular a temperature-inducible promoter or a light-inducible promoter.

[0126] The promoters may be suitable for expressing the component(s) in the systems in desired types of cells. In some cases, the promoters are for expressing the component(s) in prokaryotic cells. Examples of such promoters include filamentous haemagglutinin promoter (fhaP), lac promoter, tac promoter, trc promoter, phoA promoter, lacUV5 promoter, and the araBAD promoter. In some cases, the promoters are for expressing the component(s) in eukaryotic cells. Examples of such promoters include the cytomegalovirus (CMV) promoter, human elongation factor-1E promoter, human ubiquitin C (UbC) promoter, and SV40 early promoter. In some examples, the promoters are for expressing the component(s) in yeasts. Examples of such promoters include Gal 11 promoter and Gal 1 promoter. In some cases, the promoters may be used for expressing the components in a cell-free system. In such cases, the promoters may be selected based upon the source of the cellular transcription components, such as RNA polymerase, that are used.

### Codon Optimization

[0127] In some embodiments, at least one or more regions of the polynucleotide molecule may be codon optimized for expression in a eukaryotic cell. In certain embodiments, the polynucleotide molecules that encode one or more components of the systems as described in any of the embodiments herein are optimized for expression in a mammalian cell or a plant cell.

[0128] An example of a codon optimized sequence is in this instance a sequence optimized for expression in a eukaryote, e.g., humans (i.e. being optimized for expression in humans), or for another eukaryote, animal or mammal as herein discussed. It will be appreciated that other examples are possible and codon optimization for a host species other than human, or for codon optimization for specific organs is known. In some embodiments, an enzyme coding sequence encoding a component in the system is codon optimized for expression in particular cells, such as eukaryotic cells. The eukaryotic cells may be those of or derived from a particular organism, such as a plant or a mammal, including but not limited to human, or non-human eukaryote or animal or mammal as herein discussed, e.g., mouse, rat, rabbit, dog, livestock, or non-human mammal or primate. In some embodiments, processes for modifying the germ line genetic identity of human beings and/or processes for modifying the genetic identity of animals which are likely to cause them suffering without any substantial medical benefit to man or animal, and also animals resulting from such processes, may be excluded. In general, codon optimization refers to a process of modifying a nucleic acid sequence for enhanced expression in the host cells of interest by replacing at least one codon (e.g., about or more than about 1, 2, 3, 4, 5, 10, 15, 20, 25, 50, or more codons) of the native sequence with codons that are more frequently or most frequently used in the genes of that host cell while maintaining the native amino acid sequence.

[0129] Various species exhibit particular bias for certain codons of a particular amino acid. Codon bias (differences in codon usage between organisms) often correlates with the efficiency of translation of messenger RNA (mRNA), which is in turn believed to be dependent on, among other things, the properties of the codons being translated and the availability of particular transfer RNA (tRNA) molecules. The predominance of selected tRNAs in a cell is generally a reflection of the codons used most frequently in peptide synthesis. Accordingly, genes can be tailored for optimal gene expression in a given organism based on codon optimization. Codon usage tables are readily available, for example, at the “Codon Usage Database” available at www.kazusa.orjp/codon/ and these tables can be adapted in a number of ways. See Nakamura, Y., et al. “Codon usage tabulated from the international DNA sequence databases: status for the year 2000” Nucl. Acids Res. 28:292 (2000). Computer algorithms for codon optimizing a particular sequence for expression in a particular host cell are also available, such as Gene Forge (Aptagen; Jacobus, Pa.), are also available. In some embodiments, one or more codons (e.g., 1, 2, 3, 4, 5, 10, 15, 20, 25, 50, or more, or all codons) in a sequence encoding a component in the system corresponds to the most frequently used codon for a particular amino acid.

### Nuclear Localization Signals

[0130] In some embodiments, the systems and compositions herein further comprises one or more nuclear localization signals (NLSs) capable of driving the accumulation of the components, to a desired amount in the nucleus of a cell.

[0131] In certain embodiments, at least one nuclear localization signal (NLS) is attached to the nucleic acid sequences encoding the components in the systems. In some embodiments, one or more C-terminal or N-terminal NLSs are attached (and hence nucleic acid molecule(s) coding for the components in the systems can include coding for NLS(s) so that the expressed product has the NLS(s) attached or connected). In a preferred embodiment a C-terminal NLS is attached for optimal expression and nuclear targeting in eukaryotic cells, e.g., human cells.

[0132] Non-limiting examples of NLSs include an NLS sequence derived from: the NLS of the SV40 virus large T-antigen; the NLS from nucleoplasmin (e.g., the nucleoplasmin bipartite NLS; the c-myc NLS; the hRNPA1 M9 NLS; the sequence of the IBB domain from importin-alpha; the NLSs of the myoma T protein; the NLS of human p53; the NLS of mouse c-abl IV; the NLSs of the influenza virus NS1; the NLS of the Hepatitis virus delta antigen; the NLS of the mouse Mx1 protein; the NLS of the human poly(ADP-ribose) polymerase; and the NLS of the steroid hormone receptors (human) glucocorticoid. Examples of such NLSs include those described in paragraph [00131] in Zhang et al. WO2014093595A1.

[0133] In some embodiments, a NLS is a heterologous NLS. For example, the NLS is not naturally present in the molecule it attached to.

[0134] In general, strength of nuclear localization activity may derive from the number of NLSs in the nucleic acid-targeting effector protein, the particular NLS(s) used, or a combination of these factors. Detection of accumulation in the nucleus may be performed by any suitable technique. For example, a detectable marker may be fused to the nucleic acid-targeting protein, such that location within a cell may be visualized, such as in combination with a means for detecting the location of the nucleus (e.g., a stain specific for the nucleus such as DAPI).

[0135] In some embodiments, a vector described herein (e.g., those comprising polynucleotides encoding the components in the systems comprise one or more nuclear localization sequences (NLSs), such as about or more than about 1, 2, 3, 4, 5, 6, 7, 8, 9, 10, or more NLSs. More particularly, vector comprises one or more NLSs not naturally present in the the components in the systems. Most particularly, the NLS may be present in the vector 5′ and/or 3′ of the the components in the systems. In some embodiments, the the components in the systems comprises about or more than about 1, 2, 3, 4, 5, 6, 7, 8, 9, 10, or more NLSs at or near the amino-terminus, about or more than about 1, 2, 3, 4, 5, 6, 7, 8, 9, 10, or more NLSs at or near the carboxy-terminus, or a combination of these (e.g., zero or at least one or more NLS at the amino-terminus and zero or at one or more NLS at the carboxy terminus). When more than one NLS is present, each may be selected independently of the others, such that a single NLS may be present in more than one copy and/or in combination with one or more other NLSs present in one or more copies. In some embodiments, an NLS is considered near the N- or C-terminus when the nearest amino acid of the NLS is within about 1, 2, 3, 4, 5, 10, 15, 20, 25, 30, 40, 50, or more amino acids along the polypeptide chain from the N- or C-terminus.

[0136] In certain embodiments, other localization tags may be fused to the Cas and/or transposase(s), such as without limitation for localizing to particular sites in a cell, such as organelles, such mitochondria, plastids, chloroplast, vesicles, golgi, (nuclear or cellular) membranes, ribosomes, nucleoluse, ER, cytoskeleton, vacuoles, centrosome, nucleosome, granules, centrioles, etc.

### Fusion Proteins and Linkers

[0137] The components, e.g., proteins, domains, and nucleic acids, in the systems (from the same or different systems) may be associated (e.g., fused). The fusion may be via a linker. The term “linker” as used in reference to a fusion protein refers to a molecule which joins the proteins to form a fusion protein. Generally, such molecules have no specific biological activity other than to join or to preserve some minimum distance or other spatial relationship between the proteins. However, in certain embodiments, the linker may be selected to influence some property of the linker and/or the fusion protein such as the folding, net charge, or hydrophobicity of the linker. In some embodiments, components in different systems may be associated (e.g., fused). In some embodiments, the two or more different systems herein may be associated (e.g., fused). For example, two or more of the ATPase(s), deaminase(s), and reverse transcriptase(s) may be associated (e.g., fused) together.

[0138] Suitable linkers for use in the methods of the present invention are well known to those of skill in the art and include, but are not limited to, straight or branched-chain carbon linkers, heterocyclic carbon linkers, or peptide linkers. However, as used herein the linker may also be a covalent bond (carbon-carbon bond or carbon-heteroatom bond). In particular embodiments, the linker is used to separate the Cas protein and the ligase by a distance sufficient to ensure that each protein retains its required functional property. Preferred peptide linker sequences adopt a flexible extended conformation and do not exhibit a propensity for developing an ordered secondary structure. In certain embodiments, the linker can be a chemical moiety which can be monomeric, dimeric, multimeric or polymeric. Preferably, the linker comprises amino acids. Typical amino acids in flexible linkers include Gly, Asn and Ser. Accordingly, in particular embodiments, the linker comprises a combination of one or more of Gly, Asn and Ser amino acids. Other near neutral amino acids, such as Thr and Ala, also may be used in the linker sequence. Exemplary linkers are disclosed in Maratea et al. (1985), Gene 40: 39-46; Murphy et al. (1986) Proc. Nat'l. Acad. Sci. USA 83: 8258-62; U.S. Pat. Nos. 4,935,233; and 4,751,180. For example, GlySer linkers GGS, GGGS (SEQ ID NO: 76) or GSG can be used. GGS, GSG, GGGS (SEQ ID NO: 76) or GGGGS (SEQ ID NO: 77) linkers can be used in repeats of 3 (such as (GGS)₃ (SEQ ID NO: 78), (GGGGS)₃ (SEQ ID NO: 79)) or 5, 6, 7, 9 or even 12 or more, to provide suitable lengths. In some cases, the linker may be (GGGGS)₃₋₁₅, For example, in some cases, the linker may be (GGGGS)₃₋₁₁, e.g., GGGGS (SEQ ID NO: 77), (GGGGS)₂ (SEQ ID NO: 80), (GGGGS)₃ (SEQ ID NO: 79), (GGGGS)₄ (SEQ ID NO: 81), (GGGGS)₅ (SEQ ID NO: 82), (GGGGS)₆ (SEQ ID NO: 83), (GGGGS)₇ (SEQ ID NO: 84), (GGGGS)₈ (SEQ ID NO: 85), (GGGGS)₉ (SEQ ID NO: 86), (GGGGS)₁₀ (SEQ ID NO: 87), or (GGGGS)₁₁ (SEQ ID NO: 88).

[0139] In particular embodiments, linkers such as (GGGGS)₃ (SEQ ID NO: 79) are preferably used herein. (GGGGS)₆ (SEQ ID NO: 83), (GGGGS)₉ (SEQ ID NO: 86) or (GGGGS)₁₂ (SEQ ID NO: 89) may preferably be used as alternatives. Other preferred alternatives are (GGGGS)₁ (SEQ ID NO: 77), (GGGGS)₂ (SEQ ID NO: 80), (GGGGS)₄ (SEQ ID NO: 81), (GGGGS)₅ (SEQ ID NO: 82), (GGGGS)₇ (SEQ ID NO: 84), (GGGGS)₈ (SEQ ID NO: 85), (GGGGS)₁₀ (SEQ ID NO: 87), or (GGGGS)₁₁ (SEQ ID NO: 88). In yet a further embodiment, LEPGEKPYKCPECGKSFSQSGALTRHQRTHTR (SEQ ID NO: 90) is used as a linker. In yet an additional embodiment, the linker is an XTEN linker. In particular embodiments, the CRISPR-cas protein is a Cas protein and is linked to the ligase or its catalytic domain by means of an LEPGEKPYKCPECGKSFSQSGALTRHQRTHTR (SEQ ID NO: 90) linker. In further particular embodiments, the Cas protein is linked C-terminally to the N-terminus of a ligase or its catalytic domain by means of an LEPGEKPYKCPECGKSFSQSGALTRHQRTHTR (SEQ ID NO: 90) linker. In addition, N- and C-terminal NLSs can also function as linker (e.g., PKKKRKVEASSPKKRKVEAS (SEQ ID NO: 91)).

[0140] Examples of linkers are shown in the Table 4 below.

TABLE 4

| | |
|---|---|
| GGS | GGTGGTAGT (SEQ ID NO: 92) |
| GGSx3 (9) | GGTGGTAGTGGAGGGAGCGGCGGTTCA |
| | (SEQ ID NO: 93) |
| GGSx7 (21) | ggtggaggaggctctggtggaggcggtagcggaggcgg |
| | agggtcgGGTGGTAGTGGAGGGAGCGGCGGTTCA |
| | (SEQ ID NO: 94) |
| XTEN | TCGGGATCTGAGACGCCTGGGACCTCGGAATCGGCTAC |
| | GCCCGAAAGT (SEQ ID NO: 95) |
| Z-EGFR_ | Gtggataacaaatttaacaaagaaatgtgggcggcgtgg |
| Short | gaagaaattcgtaacctgccgaacctgaacggctggcag |
| | atgaccgcgtttattgcgagcctggtggatgatccgagc |
| | cagagcgcgaacctgctggcggaagcgaaaaaactgaac |
| | gatgcgcaggcgccgaaaaccggcggtggttctggt |
| | (SEQ ID NO: 96) |
| GSAT | Ggtggttctgccggtggctccggttctggctccagcggt |
| | ggcagctctggtgcgtccggcacgggtactgcgggtggc |
| | actggcagcggttccggtactggctctggc |
| | (SEQ ID NO: 97) |

### Adaptor Proteins

[0141] The adaptor proteins may include orthogonal RNA-binding protein/aptamer combinations that exist within the diversity of bacteriophage coat proteins. A list of such coat proteins includes, but is not limited to: Qβ, F2, GA, fr, JP501, M12, R17, BZ13, JP34, JP500, KU1, M11, MX1, TW18, VK, SP, FI, ID2, NL95, TW19, AP205, ϕCb5, ϕCb8r, ϕCb12r, ϕCb23r, 7s and PRR1.

### Heterologous Components

[0142] In some embodiments, when a system or composition herein comprises multiple components, the components may be heterologous, i.e., they do not naturally occur together in the same cell or an organism. In some examples, the system comprises an ATPase and an adenosine deaminase that are heterologous. In certain examples, the system comprises two or more heterologous reverse transcriptases.

### Cas Proteins and Variants

[0143] In some embodiments, the systems may further comprise a Cas protein or a variant thereof, and one or more guide molecules. One or more components described herein in the systems may be associated (e.g., fused) with a Cas protein or a variant thereof (a catalytically inactive). The Cas protein and guide molecule(s) may guide the components such as ATPase, deaminase, reverse transcriptase etc. to target a desired target sequence.

[0144] The Cas proteins, variants thereof, and guide molecules may be those in a CRISPR-Cas or CRISPR system, refers collectively to transcripts and other elements involved in the expression of or directing the activity of CRISPR-associated (“Cas”) genes, including sequences encoding a Cas gene, a tracr (trans-activating CRISPR) sequence (e.g. tracrRNA or an active partial tracrRNA), a tracr-mate sequence (encompassing a “direct repeat” and a tracrRNA-processed partial direct repeat in the context of an endogenous CRISPR system), a guide sequence (also referred to as a “spacer” in the context of an endogenous CRISPR system), or “RNA(s)” as that term is herein used (e.g., RNA(s) to guide Cas, such as Cas9, e.g. CRISPR RNA and transactivating (tracr) RNA or a single guide RNA (sgRNA) (chimeric RNA)) or other sequences and transcripts from a CRISPR locus. In general, a CRISPR system is characterized by elements that promote the formation of a CRISPR complex at the site of a target sequence (also referred to as a protospacer in the context of an endogenous CRISPR system). See, e.g, Shmakov et al. (2015) “Discovery and Functional Characterization of Diverse Class 2 CRISPR-Cas Systems”, Molecular Cell, DOI: dx.doi.org/10.1016/j.molce1.2015.10.008.

### Class 1 Systems

[0145] The Cas proteins may be Cas proteins in class 1 CRISPR systems. In certain example embodiments, the Class 1 system may be Type I, Type III or Type IV Cas proteins as described in Makarova et al. “Evolutionary classification of CRISPR-Cas systems: a burst of class 2 and derived variants” Nature Reviews Microbiology, 18:67-81 (February 2020), incorporated in its entirety herein by reference, and particularly as described in FIG. 1, p. 326. The Class 1 systems typically use a multi-protein effector complex, which can, in some embodiments, include ancillary proteins, such as one or more proteins in a complex referred to as a CRISPR-associated complex for antiviral defense (Cascade), one or more adaptation proteins (e.g. Cas1, Cas2, RNA nuclease), and/or one or more accessory proteins (e.g. Cas 4, DNA nuclease), CRISPR associated Rossman fold (CARF) domain containing proteins, and/or RNA transcriptase. Although Class 1 systems have limited sequence similarity, Class 1 system proteins can be identified by their similar architectures, including one or more Repeat Associated Mysterious Protein (RAMP) family subunits, e.g. Cas 5, Cas6, Cas7. RAMP proteins are characterized by having one or more RNA recognition motif domains. Large subunits (for example cas8 or cas10) and small subunits (for example, cas11) are also typical of Class 1 systems. See, e.g., FIGS. 1 and 2. Koonin E V, Makarova K S. 2019 Origins and evolution of CRISPR-Cas systems. Phil. Trans. R. Soc. B 374: 20180087, DOI: 10.1098/rstb.2018.0087. In one aspect, Class 1 systems are characterized by the signature protein Cas3. The Cascade in particular Class1 proteins can comprise a dedicated complex of multiple Cas proteins that binds pre-crRNA and recruits an additional Cas protein, for example Cas6 or Cas5, which is the nuclease directly responsible for processing pre-crRNA. In one aspect, the Type I CRISPR protein comprises an effector complex comprises one or more Cas5 subunits and two or more Cas⁷ subunits. Class 1 subtypes include Type I-A, I-B, I-C, I-U, I-D, I-E, and I-F, Type IV-A and IV-B, and Type III-A, III-D, III-C, and III-B. Class 1 systems also include CRISPR-Cas variants, including Type I-A, I-B, I-E, I-F and I-U variants, which can include variants carried by transposons and plasmids, including versions of subtype I-F encoded by a large family of Tn7-like transposon and smaller groups of Tn7-like transposons that encode similarly degraded subtype I-B systems. Peters et al., PNAS 114 (35) (2017); DOI: 10.1073/pnas.1709035114; see also, Makarova et al, the CRISPR Journal, v. 1, n5, FIG. 5.

### Class 2 Systems

[0146] The Cas proteins may be Cas proteins in class 2 CRISPR-Cas systems. Class 2 systems are distinguished from Class 1 systems in that they have a single, large, multi-domain effector protein. In certain example embodiments, the Class 2 system can be a Type II, Type V, or Type VI system, which are described in Makarova et al. “Evolutionary classification of CRISPR-Cas systems: a burst of class 2 and derived variants” Nature Reviews Microbiology, 18:67-81 (February 2020), incorporated herein by reference. Each type of Class 2 system is further divided into subtypes. See Markova et al. 2020, particularly at Figure. 2. Class 2, Type II systems can be divided into 4 subtypes: II-A, II-B, II-C1, and II-C2. Class 2, Type V systems can be divided into 17 subtypes: V-A, V-B1, V-B2, V-C, V-D, V-E, V-F1, V-F1(V-U3), V-F2, V-F3, V-G, V-H, V-I, V-K (V-U5), V-U1, V-U2, and V-U4. Class 2, Type IV systems can be divided into 5 subtypes: VI-A, VI-B1, VI-B2, VI-C, and VI-D.

[0147] The distinguishing feature of these types is that their effector complexes consist of a single, large, multi-domain protein. Type V systems differ from Type II effectors (e.g., Cas9), which contain two nuclear domains that are each responsible for the cleavage of one strand of the target DNA, with the HNH nuclease inserted inside the Ruv-C like nuclease domain sequence. The Type V systems (e.g., Cas12) only contain a RuvC-like nuclease domain that cleaves both strands. Type VI (Cas13) are unrelated to the effectors of Type II and V systems and contain two HEPN domains and target RNA. Cas13 proteins also display collateral activity that is triggered by target recognition. Some Type V systems have also been found to possess this collateral activity with two single-stranded DNA in in vitro contexts.

[0148] In some embodiments, the Class 2 system is a Type II system. In some embodiments, the Type II CRISPR-Cas system is a II-A CRISPR-Cas system. In some embodiments, the Type II CRISPR-Cas system is a II-B CRISPR-Cas system. In some embodiments, the Type II CRISPR-Cas system is a II-C1 CRISPR-Cas system. In some embodiments, the Type II CRISPR-Cas system is a II-C2 CRISPR-Cas system. In some embodiments, the Type II system is a Cas9 system. In some embodiments, the Type II system includes a Cas9.

[0149] In some embodiments, the Class 2 system is a Type V system. In some embodiments, the Type V CRISPR-Cas system is a V-A CRISPR-Cas system. In some embodiments, the Type V CRISPR-Cas system is a V-B1 CRISPR-Cas system. In some embodiments, the Type V CRISPR-Cas system is a V-B2 CRISPR-Cas system. In some embodiments, the Type V CRISPR-Cas system is a V-C CRISPR-Cas system. In some embodiments, the Type V CRISPR-Cas system is a V-D CRISPR-Cas system. In some embodiments, the Type V CRISPR-Cas system is a V-E CRISPR-Cas system. In some embodiments, the Type V CRISPR-Cas system is a V-F1 CRISPR-Cas system. In some embodiments, the Type V CRISPR-Cas system is a V-F1 (V-U3) CRISPR-Cas system. In some embodiments, the Type V CRISPR-Cas system is a V-F2 CRISPR-Cas system. In some embodiments, the Type V CRISPR-Cas system is a V-F3 CRISPR-Cas system. In some embodiments, the Type V CRISPR-Cas system is a V-G CRISPR-Cas system. In some embodiments, the Type V CRISPR-Cas system is a V-H CRISPR-Cas system. In some embodiments, the Type V CRISPR-Cas system is a V-I CRISPR-Cas system. In some embodiments, the Type V CRISPR-Cas system is a V-K (V-U5) CRISPR-Cas system. In some embodiments, the Type V CRISPR-Cas system is a V-U1 CRISPR-Cas system. In some embodiments, the Type V CRISPR-Cas system is a V-U2 CRISPR-Cas system. In some embodiments, the Type V CRISPR-Cas system is a V-U4 CRISPR-Cas system. In some embodiments, the Type V CRISPR-Cas system includes a Cas12a (Cpf1), Cas12b (C2c1), Cas12c (C2c3), Cas12d (CasY), Cas12e (CasX), and/or Cas14.

[0150] In some embodiments the Class 2 system is a Type VI system. In some embodiments, the Type VI CRISPR-Cas system is a VI-A CRISPR-Cas system. In some embodiments, the Type VI CRISPR-Cas system is a VI-B1 CRISPR-Cas system. In some embodiments, the Type VI CRISPR-Cas system is a VI-B2 CRISPR-Cas system. In some embodiments, the Type VI CRISPR-Cas system is a VI-C CRISPR-Cas system. In some embodiments, the Type VI CRISPR-Cas system is a VI-D CRISPR-Cas system. In some embodiments, the Type VI CRISPR-Cas system includes a Cas13a (C2c2), Cas13b (Group 29/30), Cas13c, and/or Cas13d.

### Specialized Cas-Based Systems

[0151] In some embodiments, the system is a Cas-based system that is capable of performing a specialized function or activity. For example, the Cas protein may be fused, operably coupled to, or otherwise associated with one or more functionals domains. In certain example embodiments, the Cas protein may be a catalytically dead Cas protein (“dCas”) and/or have nickase activity. A nickase is a Cas protein that cuts only one strand of a double stranded target. In such embodiments, the dCas or nickase provide a sequence specific targeting functionality that delivers the functional domain to or proximate a target sequence. Example functional domains that may be fused to, operably coupled to, or otherwise associated with a Cas protein can be or include, but are not limited to a nuclear localization signal (NLS) domain, a nuclear export signal (NES) domain, a translational activation domain, a transcriptional activation domain (e.g. VP64, p65, MyoD1, HSF1, RTA, and SETT/9), a translation initiation domain, a transcriptional repression domain (e.g., a KRAB domain, NuE domain, NcoR domain, and a SID domain such as a SID4X domain), a nuclease domain (e.g., FokI), a histone modification domain (e.g., a histone acetyltransferase), a light inducible/controllable domain, a chemically inducible/controllable domain, a transposase domain, a homologous recombination machinery domain, a recombinase domain, an integrase domain, and combinations thereof. Methods for generating catalytically dead Cas9 or a nickase Cas9 (WO 2014/204725, Ran et al. Cell. 2013 Sep. 12; 154(6):1380-1389), Cas12 (Liu et al. Nature Communications, 8, 2095 (2017), and Cas13 (International Patent Publication Nos. WO 2019/005884 and WO2019/060746) are known in the art and incorporated herein by reference.

[0152] In some embodiments, the functional domains can have one or more of the following activities: methylase activity, demethylase activity, translation activation activity, translation initiation activity, translation repression activity, transcription activation activity, transcription repression activity, transcription release factor activity, histone modification activity, nuclease activity, single-strand RNA cleavage activity, double-strand RNA cleavage activity, single-strand DNA cleavage activity, double-strand DNA cleavage activity, molecular switch activity, chemical inducibility, light inducibility, and nucleic acid binding activity. In some embodiments, the one or more functional domains may comprise epitope tags or reporters. Non-limiting examples of epitope tags include histidine (His) tags, V5 tags, FLAG tags, influenza hemagglutinin (HA) tags, Myc tags, VSV-G tags, and thioredoxin (Trx) tags. Examples of reporters include, but are not limited to, glutathione-S-transferase (GST), horseradish peroxidase (HRP), chloramphenicol acetyltransferase (CAT) beta-galactosidase, beta-glucuronidase, luciferase, green fluorescent protein (GFP), HcRed, DsRed, cyan fluorescent protein (CFP), yellow fluorescent protein (YFP), and auto-fluorescent proteins including blue fluorescent protein (BFP).

[0153] The one or more functional domain(s) may be positioned at, near, and/or in proximity to a terminus of the effector protein (e.g., a Cas protein). In embodiments having two or more functional domains, each of the two can be positioned at or near or in proximity to a terminus of the effector protein (e.g., a Cas protein). In some embodiments, such as those where the functional domain is operably coupled to the effector protein, the one or more functional domains can be tethered or linked via a suitable linker (including, but not limited to, GlySer linkers) to the effector protein (e.g., a Cas protein). When there is more than one functional domain, the functional domains can be same or different. In some embodiments, all the functional domains are the same. In some embodiments, all of the functional domains are different from each other. In some embodiments, at least two of the functional domains are different from each other. In some embodiments, at least two of the functional domains are the same as each other.

[0154] Other suitable functional domains can be found, for example, in International Patent Publication No. WO 2019/018423.

### Split CRISPR-Cas Systems

[0155] In some embodiments, the CRISPR-Cas system is a split CRISPR-Cas system. See e.g., Zetche et al., 2015. Nat. Biotechnol. 33(2): 139-142 and International Patent Publication WO 2019/018423, the compositions and techniques of which can be used in and/or adapted for use with the present invention. Split CRISPR-Cas proteins are set forth herein and in documents incorporated herein by reference in further detail herein. In certain embodiments, each part of a split CRISPR protein are attached to a member of a specific binding pair, and when bound with each other, the members of the specific binding pair maintain the parts of the CRISPR protein in proximity. In certain embodiments, each part of a split CRISPR protein is associated with an inducible binding pair. An inducible binding pair is one which is capable of being switched “on” or “off” by a protein or small molecule that binds to both members of the inducible binding pair. In some embodiments, CRISPR proteins may preferably split between domains, leaving domains intact. In particular embodiments, said Cas split domains (e.g., RuvC and HNH domains in the case of Cas9) can be simultaneously or sequentially introduced into the cell such that said split Cas domain(s) process the target nucleic acid sequence in the algae cell. The reduced size of the split Cas compared to the wild type Cas allows other methods of delivery of the systems to the cells, such as the use of cell penetrating peptides as described herein.

### Guide Molecules

[0156] The guide molecules (i.e., a molecule comprising a guide sequence) refer to polynucleotides capable of guiding Cas to a target genomic locus and are used interchangeably as in foregoing cited documents such as International Patent Publication No. WO 2014/093622 (PCT/US2013/074667). In general, a guide molecule may be any polynucleotide sequence having sufficient complementarity with a target polynucleotide sequence to hybridize with the target sequence and direct sequence-specific binding of a CRISPR complex to the target sequence. The guide molecule can be a polynucleotide.

[0157] The ability of a guide sequence (within a nucleic acid-targeting guide RNA) to direct sequence-specific binding of a nucleic acid-targeting complex to a target nucleic acid sequence may be assessed by any suitable assay. For example, the components of a nucleic acid-targeting CRISPR system sufficient to form a nucleic acid-targeting complex, including the guide sequence to be tested, may be provided to a host cell having the corresponding target nucleic acid sequence, such as by transfection with vectors encoding the components of the nucleic acid-targeting complex, followed by an assessment of preferential targeting (e.g., cleavage) within the target nucleic acid sequence, such as by Surveyor assay (Qui et al. 2004. BioTechniques. 36(4)702-707). Similarly, cleavage of a target nucleic acid sequence may be evaluated in a test tube by providing the target nucleic acid sequence, components of a nucleic acid-targeting complex, including the guide sequence to be tested and a control guide sequence different from the test guide sequence, and comparing binding or rate of cleavage at the target sequence between the test and control guide sequence reactions. Other assays are possible and will occur to those skilled in the art.

[0158] In some embodiments, the guide molecule is an RNA. The guide molecule(s) (also referred to interchangeably herein as guide polynucleotide and guide sequence) that are included in the CRISPR-Cas or Cas based system can be any polynucleotide sequence having sufficient complementarity with a target nucleic acid sequence to hybridize with the target nucleic acid sequence and direct sequence-specific binding of a nucleic acid-targeting complex to the target nucleic acid sequence. In some embodiments, the degree of complementarity, when optimally aligned using a suitable alignment algorithm, can be about or more than about 50%, 60%, 75%, 80%, 85%, 90%, 95%, 97.5%, 99%, or more. Optimal alignment may be determined with the use of any suitable algorithm for aligning sequences, non-limiting examples of which include the Smith-Waterman algorithm, the Needleman-Wunsch algorithm, algorithms based on the Burrows-Wheeler Transform (e.g., the Burrows Wheeler Aligner), ClustalW, Clustal X, BLAT, Novoalign (Novocraft Technologies; available at www.novocraft.com), ELAND (Illumina, San Diego, Calif.), SOAP (available at soap.genomics.org.cn), and Maq (available at maq.sourceforge.net).

[0159] A guide sequence, and hence a nucleic acid-targeting guide, may be selected to target any target nucleic acid sequence. The target sequence may be DNA. The target sequence may be any RNA sequence. In some embodiments, the target sequence may be a sequence within an RNA molecule selected from the group consisting of messenger RNA (mRNA), pre-mRNA, ribosomal RNA (rRNA), transfer RNA (tRNA), micro-RNA (miRNA), small interfering RNA (siRNA), small nuclear RNA (snRNA), small nucleolar RNA (snoRNA), double stranded RNA (dsRNA), non-coding RNA (ncRNA), long non-coding RNA (lncRNA), and small cytoplasmatic RNA (scRNA). In some preferred embodiments, the target sequence may be a sequence within an RNA molecule selected from the group consisting of mRNA, pre-mRNA, and rRNA. In some preferred embodiments, the target sequence may be a sequence within an RNA molecule selected from the group consisting of ncRNA, and lncRNA. In some more preferred embodiments, the target sequence may be a sequence within an mRNA molecule or a pre-mRNA molecule.

[0160] In some embodiments, a nucleic acid-targeting guide is selected to reduce the degree secondary structure within the nucleic acid-targeting guide. In some embodiments, about or less than about 75%, 50%, 40%, 30%, 25%, 20%, 15%, 10%, 5%, 1%, or fewer of the nucleotides of the nucleic acid-targeting guide participate in self-complementary base pairing when optimally folded. Optimal folding may be determined by any suitable polynucleotide folding algorithm. Some programs are based on calculating the minimal Gibbs free energy. An example of one such algorithm is mFold, as described by Zuker and Stiegler (Nucleic Acids Res. 9 (1981), 133-148). Another example folding algorithm is the online webserver RNAfold, developed at Institute for Theoretical Chemistry at the University of Vienna, using the centroid structure prediction algorithm (see e.g., A. R. Gruber et al., 2008, Cell 106(1): 23-24; and PA Carr and GM Church, 2009, Nature Biotechnology 27(12): 1151-62).

[0161] In certain embodiments, a guide RNA or crRNA may comprise, consist essentially of, or consist of a direct repeat (DR) sequence and a guide sequence or spacer sequence. In certain embodiments, the guide RNA or crRNA may comprise, consist essentially of, or consist of a direct repeat sequence fused or linked to a guide sequence or spacer sequence. In certain embodiments, the direct repeat sequence may be located upstream (i.e., 5′) from the guide sequence or spacer sequence. In other embodiments, the direct repeat sequence may be located downstream (i.e., 3′) from the guide sequence or spacer sequence.

[0162] In certain embodiments, the crRNA comprises a stem loop, e.g., a single stem loop. In certain embodiments, the direct repeat sequence forms a stem loop, e.g., a single stem loop.

[0163] In certain embodiments, the spacer length of the guide RNA is from 15 to 35 nt. In certain embodiments, the spacer length of the guide RNA is at least 15 nucleotides. In certain embodiments, the spacer length is from 15 to 17 nt, e.g., 15, 16, or 17 nt, from 17 to 20 nt, e.g., 17, 18, 19, or 20 nt, from 20 to 24 nt, e.g., 20, 21, 22, 23, or 24 nt, from 23 to 25 nt, e.g., 23, 24, or 25 nt, from 24 to 27 nt, e.g., 24, 25, 26, or 27 nt, from 27 to 30 nt, e.g., 27, 28, 29, or 30 nt, from 30 to 35 nt, e.g., 30, 31, 32, 33, 34, or 35 nt, or 35 nt or longer.

[0164] The “tracrRNA” sequence or analogous terms includes any polynucleotide sequence that has sufficient complementarity with a crRNA sequence to hybridize. In some embodiments, the degree of complementarity between the tracrRNA sequence and crRNA sequence along the length of the shorter of the two when optimally aligned is about or more than about 25%, 30%, 40%, 50%, 60%, 70%, 80%, 90%, 95%, 97.5%, 99%, or higher. In some embodiments, the tracr sequence is about or more than about 5, 6, 7, 8, 9, 10, 11, 12, 13, 14, 15, 16, 17, 18, 19, 20, 25, 30, 40, 50, or more nucleotides in length. In some embodiments, the tracr sequence and crRNA sequence are contained within a single transcript, such that hybridization between the two produces a transcript having a secondary structure, such as a hairpin.

[0165] In general, degree of complementarity is with reference to the optimal alignment of the sca sequence and tracr sequence, along the length of the shorter of the two sequences. Optimal alignment may be determined by any suitable alignment algorithm and may further account for secondary structures, such as self-complementarity within either the sca sequence or tracr sequence. In some embodiments, the degree of complementarity between the tracr sequence and sca sequence along the length of the shorter of the two when optimally aligned is about or more than about 25%, 30%, 40%, 50%, 60%, 70%, 80%, 90%, 95%, 97.5%, 99%, or higher.

[0166] In some embodiments, the degree of complementarity between a guide sequence and its corresponding target sequence can be about or more than about 50%, 60%, 75%, 80%, 85%, 90%, 95%, 97.5%, 99%, or 100%; a guide or RNA or sgRNA can be about or more than about 5, 10, 11, 12, 13, 14, 15, 16, 17, 18, 19, 20, 21, 22, 23, 24, 25, 26, 27, 28, 29, 30, 35, 40, 45, 50, 75, or more nucleotides in length; or guide or RNA or sgRNA can be less than about 75, 50, 45, 40, 35, 30, 25, 20, 15, 12, or fewer nucleotides in length; and tracr RNA can be 30 or 50 nucleotides in length. In some embodiments, the degree of complementarity between a guide sequence and its corresponding target sequence is greater than 94.5% or 95% or 95.5% or 96% or 96.5% or 97% or 97.5% or 98% or 98.5% or 99% or 99.5% or 99.9%, or 100%. Off target is less than 100% or 99.9% or 99.5% or 99% or 99% or 98.5% or 98% or 97.5% or 97% or 96.5% or 96% or 95.5% or 95% or 94.5% or 94% or 93% or 92% or 91% or 90% or 89% or 88% or 87% or 86% or 85% or 84% or 83% or 82% or 81% or 80% complementarity between the sequence and the guide, with it being advantageous that off target is 100% or 99.9% or 99.5% or 99% or 99% or 98.5% or 98% or 97.5% or 97% or 96.5% or 96% or 95.5% or 95% or 94.5% complementarity between the sequence and the guide.

[0167] In some embodiments according to the invention, the guide RNA (capable of guiding Cas to a target locus) may comprise (1) a guide sequence capable of hybridizing to a genomic target locus in the eukaryotic cell; (2) a tracr sequence; and (3) a tracr mate sequence. All (1) to (3) may reside in a single RNA, i.e., an sgRNA (arranged in a 5′ to 3′ orientation), or the tracr RNA may be a different RNA than the RNA containing the guide and tracr sequence. The tracr hybridizes to the tracr mate sequence and directs the CRISPR/Cas complex to the target sequence. Where the tracr RNA is on a different RNA than the RNA containing the guide and tracr sequence, the length of each RNA may be optimized to be shortened from their respective native lengths, and each may be independently chemically modified to protect from degradation by cellular RNase or otherwise increase stability.

[0168] Many modifications to guide sequences are known in the art and are further contemplated within the context of this invention. Various modifications may be used to increase the specificity of binding to the target sequence and/or increase the activity of the Cas protein and/or reduce off-target effects. Example guide sequence modifications are described in International Patent Application No. PCT US2019/045582, specifically paragraphs [0178]-[0333]. which is incorporated herein by reference.

### Methods of Identifying Defense Systems

[0169] The present disclosure further provides methods of identifying defense systems. In some embodiments, the methods are based on the facts that genes of defense systems often form clusters in the genome. Thus, candidate defense system genes may be those co-locate with known defense system genes in the genomes of multiple cells of a species or strain. Accordingly, novel defense system be identified by recording or identifying candidate genes located close to known defense systems and identifying homologs of the candidate genes in multiple genomes of the species or cells. The candidate genes that have a significant number of homologs close to known defense system genes may be selected as a putative novel defense system genes. The selected putative defense system genes may be further validated by experiments, e.g., by testing their effects on phage resistance.

[0170] In some examples, the methods of identifying a defense system in a microorganism may comprise identifying genes of known defense systems in a plurality of genomes of the microorganism; recording candidate genes located within 50 kb from the identified genes of known defense systems on the genomes; identifying homologs of each candidate gene on the genomes; and selecting candidate genes wherein at least 10% of homologs of the candidate genes are within 5000 nucleotides and/or 5 genes from one or more known defense systems on the genomes. FIGS. 4 and 8 show flow charts of exemplary methods of identifying novel defense systems.

[0171] In some cases, the recorded candidate genes may be located less than 50 kb, less than 40 kb, less than 30 kb, less than 20 kb, less than 10 kb, less than 8 kb, less than 6 kb, less than 4 kb, less than 2 kb, less than 1000 bp, less than 800 bp, less than 600 bp, less than 400 bp, or less than 200 bp from the identified genes of known defense systems on the genomes. In some cases, the recorded candidate genes may be located less than 20, less than 18, less than 16, less than 14, less than 12, less than 10, less than 8, less than 6, less than 4, or less than 2 open reading frames from the identified genes of known defense systems on the genomes.

[0172] The methods of identifying defense systems may comprise obtaining sequence data of multiple genomes. The multiple genomes may be those from different microorganism cells of the same species or strain. The sequence data used may be from at least 2, at least 3, at least 4, at least 5, at least 6, at least 7, at least 8, at least 9, at least 10, at least 20, at least 30, at least 40, at least 50, at least 60, at least 70, at least 80, at least 90, at least 100, at least 200, at least 400, at least 600, at least 800, at least 1000, at least 2000, at least 4000, at least 8000, at least 10,000, at least 20,000, at least 40,000, at least 60,000, at least 80,000, at least 100,000, at least 120,000, at least 140,000, at least 160,000, at least 180,000, or at least 200,000 genomes.

[0173] The methods of identifying defense systems may comprise identifying known defense system genes in multiple genomes. The known defense systems or their genes may be identified using sequence alignments and comparing with known sequences, motifs or domains in a protein or nucleic acid domain database. The domains within the gene members of each system may be analyzed bioinformatically using the tools HHpred (Soding J, Biegert A, Lupas A N. (2005) The HHpred interactive server for protein homology detection and structure prediction, nucleic Acids Res. 33: W244-W248; Alva V, Nam S-Z, Soding J, Lupas A N, I. S, S. C, et al. (2016) The MPI bioinformatics Toolkit as an integrative platform for advanced protein sequence and structure analysis, nucleic Acids Res. Oxford University Press; 44: W410-W415), Phyre2 (Kelley L A, Mezulis S, Yates C M, Wass M N, Sternberg M J E. (2015) The Phyre2 web portal for protein modeling, prediction and analysis. Nat Protoc. Nature Research; 10: 845-858), PSI-BLAST (Altschul S F, Madden T L, Schaffer A A, Zhang J, Zhang Z, Miller W, et al. (1997) Gapped BLAST and PSI-BLAST: a new generation of protein database search programs, nucleic Acids Res. 25: 3389-402).

[0174] In some examples, the database may be PFAM. The term “pfam” may encompass a large collection of protein domains and protein families maintained by the pfam consortium and available at several sponsored world wide web sites, including for example: pfam.sanger.ac.uk/(Welcome Trust, Sanger Institute); pfam.sbc.su.se/ (Stockholm Bioinformatics Center); pfam(dot)janelia(dot)org/(Janelia Farm, Howard Hughes Medical Institute); pfam(dot)jouy(dot)inra(dot)fr/(Institut national de la Recherche Agronomique); and pfam.ccbb.re.kr/. pfam domains and families are identified using multiple sequence alignments and hidden Markov models (HMMs) (see e.g. R. D. Finnet et al. nucleic Acids Research Database (2010) Issue 38: D211-222). By accessing the pfam database, for example, using any of the above-reference websites, protein sequences can be queried against the hidden Markov models (HMMMs) using HMMER homology search software (e.g., HMMER3, hmmer(dot)j anelia(dot)org/).

[0175] In some examples, the database may be NCBI's Conserved Domain Database (CDD) (Marchler-Bauer A, Lu S, Anderson J B, Chitsaz F, Derbyshire M K, DeWeese-Scott C, et al. (2011) CDD: a Conserved Domain Database for the functional annotation of proteins, nucleic Acids Res. 39: D225-D229).

[0176] In some examples, the database may be COG. The term “COG (clusters of orthologous groups)” may encompass a large collection of protein families classified according to their homologous relationships available at e.g. the NCBI COG website (www(dot)ncbi(dot)nlm(dot)nih(dot)gov/COG). Each COG comprises a group of proteins found to be orthologous across at least three lineages and likely corresponds to an ancient conserved domain [see e.g. Tatusov et al. Science 1997 Oct. 24; 278(5338):631-7; and Tatusov et al. nucleic Acids Res. 2000 Jan. 1; 28(1): 33-36].

[0177] The methods may further comprise filter false positives among the identified known defense genes.

[0178] The methods may further comprise, after the false positives of the known defense genes are filtered, identifying known defense systems. A defense system may comprise one or more defense proteins or nucleic acids involved in defense function. Examples of the known defense systems used in the methods include mobilome, a CRISPR system, Type I RM and McrBC system, BREX-associated system, Zorya system, Wadjet system, Druantia-associated system, Hachiman system, Lamassu system, Thoeris-like system, Gabija system, Septu system, pAgo system, Shedu system, Kiwa system, DUF499-DUF1156 system, and Toxin/antitoxin system.

[0179] The methods may further comprise recording (e.g., tabulating) candidate genes, which are genes within certain distance of a known defense system gene. The candidate genes may be on the 5′ side or the 3′ side of the defense system gene. For examples, the candidate genes may be within 50 kb, 40 kb, 30 kb, 20 kb, 18 kb, 16 kb, 14 kb, 12 kb, 10 kb, 9 kb, 8 kb, 7 kb, 6 kb, 5 kb, 4 kb, 3 kb, 2 kb, 1 kb, 900 bp, 800 bp, 700 bp, 600 bp, 500 bp, 400 bp, 300 bp, 200 bp, or 100 bp from the known defense system. In some examples, the candidate genes are within 10 kb of a defense system. In some cases, each of the candidate gene is called a seed.

[0180] The methods may further comprise, for each of the candidate gene, identifying homologs in the genomes. A homolog of the candidate gene may be a gene that share at least 50%, 60%, 70%, 80%, 90%, 95%, 99%, or 100% sequence identity with the candidate gene. In some examples, the homologs share at least 70% of sequence identity with the candidate genes.

[0181] In some cases, the homologs may have an E-value of 10⁻³ or lower, 10⁻⁴ or lower, 10⁻⁵ or lower, 10⁻⁶ or lower, 10⁻⁷ or lower, or 10⁻⁸ or lower. The Expect value or E-value refers to a parameter that describes the number of hits one can “expect” to see by chance when searching a database of a particular size. Essentially, the E-value describes the random background noise. For example, an E value of 1 assigned to a hit can be interpreted as meaning that in a database of the current size one might expect to see 1 match with a similar score simply by chance. The lower the E-value, or the closer it is to zero, the more “significant” the match (e.g., homology, identity) is.

[0182] The methods may further comprise selecting putative defense system genes from the candidate genes. The selected putative defense system genes may have at least a portion of the homologs in proximity to the known defense system genes. For example, a selected putative defense system genes may have at least 5%, at least 10%, at least 11%, at least 12%, at least 13%, at least 14%, at least 15%, at least 16%, at least 17%, at least 18%, at least 19%, at least 20%, at least 25%, at least 30%, at least 35%, at least 40%, at least 45%, or at least 50% of its homologs. In some examples, a selected putative defense system genes may have at least 15% of the its homologs in proximity to the known defense system.

[0183] In some embodiments, the selection of putative defense system genes comprises selecting putative cassettes comprising multiple candidate genes. Each of the candidate genes in the putative cassette may have at least 5%, at least 10%, at least 11%, at least 12%, at least 13%, at least 14%, at least 15%, at least 16%, at least 17%, at least 18%, at least 19%, at least 20%, at least 25%, at least 30%, at least 35%, at least 40%, at least 45%, or at least 50% of its homologs. In some examples, each of the candidate genes in the putative cassette may have at least 15% of the its homologs in proximity to the known defense system.

[0184] When a candidate gene or its homolog is in proximity to a known defense gene, the candidate gene or its homolog may be within 1000 nt, 900 nt, 800 nt, 700 nt, 600 nt, 500 nt, 400 nt, 300 nt, 200 nt, 100 nt, 80 nt, 60 nt, 40 nt, 20 nt, 10 nt, 5 nt, 4 nt, 3 nt, 2 nt, or 1 nt from the known defense gene.

### Validation of Identified Defense Systems

[0185] In some embodiments, the methods further comprise validating the selected putative defense systems and genes. The validation may be performed by introducing the putative defense system in host cells, infected the cells with virus (e.g., phages), and test phage infection efficiencies. Host cells introduced with a functional defense system may significantly suppress the phage infection efficiency. Examples of methods of validation include those described in Doron S. et al., Science. 2018 Mar. 2; 359(6379), Systematic discovery of antiphage defense systems in the microbial pangenome.

### Methods of Use

[0186] The defense systems herein may be introduced to host cells to manipulate the cells' function and activity. In some examples, the defense systems may be introduced to bacteria to manipulate their resistance to phage infection. In some embodiments, the defense systems may be introduced to eukaryotic cells to manipulate the function, structure, level, and/or expression of proteins or nucleic acids.

### Protection of Bacteria

[0187] In some embodiments, the defense systems may be introduced to bacteria or other host cells to increase the cells' resistance to an infection. In some cases, the defense systems may be used to protect bacterial fermentation from phage infection and contamination, which is a main cause of slow fermentation or complete starter failure. The lack of bacteria which survive adequately can result in milk products which do not have a desirable taste.

[0188] In some embodiments, the defense systems may be introduced to bacteria useful in the manufacture of dairy and fermentation processing such as, but not limited to, milk-derived products, such as cheeses, yogurt, fermented milk products, sour milks, and buttermilk. In some embodiments, the bacteria are useful as a part of the starter culture in the manufacture of dairy and fermentation processing. In some embodiments, the starter culture is a food grade starter culture. Examples of such bacteria include lactic acid bacteria, which encompass Gram positive, microaerophillic or anaerobic bacteria which ferment sugar with the production of acids including lactic acid as the predominantly produced acid, acetic acid, formic acid and propionic acid. Examples of the bacteria include Lactococcus species, Streptococcus species, Lactobacillus species, Leuconostoc species, Oenococcus species, Pediococcus species, Bifidobacterium species, and Propionibacterium species. In some embodiments, bacteria protected in a method of protecting bacteria from phage infection comprises bacteria selected from a Lactococcus species, a Streptococcus species, a Lactobacillus species, a Leuconostoc species, a Oenococcus species, a Pediococcus species, a Bifidobacterium, and a Propionibacterium species. In some embodiments, a method of protecting bacteria from phage infection comprises protecting a Lactococcus species of bacteria. In some embodiments a method of protecting bacteria from phage infection comprises protecting a Streptococcus species of bacteria. In some embodiments a method of protecting bacteria from phage infection comprises protecting a Lactobacillus species of bacteria. In some embodiments, a method of protecting bacteria from phage infection comprises protecting a Leuconostoc species of bacteria. In some embodiments, a method of protecting bacteria from phage infection comprises protecting a Oenococcus species of bacteria. In some embodiments, a method of protecting bacteria from phage infection comprises protecting a Pediococcus species of bacteria. In some embodiments, a method of protecting bacteria from phage infection comprises protecting a Bifidobacterium of bacteria. In some embodiments, a method of protecting bacteria from phage infection comprises protecting a Propionibacterium species of bacteria.

### Enhancing Bacteria Susceptibility to Infection

[0189] In some embodiments, the defense systems may be introduced to bacteria or other host cells to decrease the cells' resistance to an infection. In some examples, the defense system may be engineered to reduce or eliminate its defense function. In certain examples, one or more modulating agents that manipulate the function or level of the defense systems may be introduced to the host cells.

[0190] In some examples, the present disclosure provides methods of treating bacterial infection in a subject in need thereof, the method comprising administering to the subject a therapeutically effective amount of the anti-Defense System agent, thereby treating the bacterial infection in the subject. In some embodiments, there is provided the agent, for use in the treatment of bacterial infection in a subject in need thereof. In some examples, the present disclosure provides methods of generating cells as reagents that can be easily infected by phages. Such cells may be used as research tools in biotechnology.

### Engineered Cells

[0191] The present disclosure provides engineered cells comprising the systems and/or polynucleotides herein. In some cases, the cells may be where the plasmids and/or vesicles are produced. For example, the cells may be host cells, such as bacterial cells. In some examples, the cells may be eukaryotic cells, in which the systems are used for manipulating the function and other activities of the cells.

[0192] The cell may be a prokaryotic cell. The prokaryotic cell may be a bacterial cell. The prokaryotic cell may be an archaea cell. Examples of bacterial cells include those from the genus Escherichia, Bacillus, Lactobacillus, Rhodococcus, Rodhobacter, Synechococcus, Synechoystis, Pseudomonas, Psedoaltermonas, Stenotrophamonas, and Streptomyces. Examples of bacterial cells include Escherichia coli cells, Caulobacter crescentus cells, Rodhobacter sphaeroides cells, Psedoaltermonas haloplanktis cells. Suitable strains of bacterial include, but are not limited to BL21(DE3), DL21(DE3)-pLysS, BL21 Star-pLysS, BL21-SI, BL21-AI, Tuner, Tuner pLysS, Origami, Origami B pLysS, Rosetta, Rosetta pLysS, Rosetta-gami-pLysS, BL21 CodonPlus, AD494, BL2trxB, HMS174, NovaBlue(DE3), BLR, C41(DE3), C43(DE3), Lemo21(DE3), Shuffle T7, ArcticExpress and ArticExpress (DE3).

[0193] The cell can be a eukaryotic cell. The eukaryotic cells may be those of or derived from a particular organism, such as a plant or a mammal, including human, or non-human eukaryote or animal or mammal as herein discussed, e.g., mouse, rat, rabbit, dog, livestock, or non-human mammal or primate. In some aspects the engineered cell can be a cell line. Examples of cell lines include C8161, CCRF-CEM, MOLT, mIMCD-3, NHDF, HeLa-S3, Huhl, Huh4, Huh7, HUVEC, HASMC, HEKn, HEKa, MiaPaCell, Pancl, PC-3, TF1, CTLL-2, C1R, Rath, CV1, RPTE, A10, T24, J82, A375, ARH-77, Calul, SW480, SW620, SKOV3, SK-UT, CaCo2, P388D1, SEM-K2, WEHI-231, HB56, TIB55, Jurkat, J45.01, LRMB, Bc1-1, BC-3, IC21, DLD2, Raw264.7, NRK, NRK-52E, MRCS, MEF, Hep G2, HeLa B, HeLa T4, COS, COS-1, COS-6, COS-M6A, BS-C-1 monkey kidney epithelial, BALB/3T3 mouse embryo fibroblast, 3T3 Swiss, 3T3-L1, 132-d5 human fetal fibroblasts; 10.1 mouse fibroblasts, 293-T, 3T3, 721, 9L, A2780, A2780ADR, A2780cis, A172, A20, A253, A431, A-549, ALC, B16, B35, BCP-1 cells, BEAS-2B, bEnd.3, BHK-21, BR 293, BxPC3, C3H-10T1/2, C6/36, Cal-27, CHO, CHO-7, CHO-IR, CHO-K1, CHO-K2, CHO-T, CHO Dhfr−/−, COR-L23, COR-L23/CPR, COR-L23/5010, COR-L23/R23, COS-7, COV-434, CML T1, CMT, CT26, D17, DH82, DU145, DuCaP, EL4, EM2, EM3, EMT6/AR1, EMT6/AR10.0, FM3, H1299, H69, HB54, HB55, HCA2, HEK-293, HeLa, Hepalc1c7, HL-60, HMEC, HT-29, Jurkat, JY cells, K562 cells, Ku812, KCL22, KG1, KYO1, LNCap, Ma-Mel 1-48, MC-38, MCF-7, MCF-10A, MDA-MB-231, MDA-MB-468, MDA-MB-435, MDCK II, MDCK II, MOR/0.2R, MONO-MAC 6, MTD-1A, MyEnd, NCI-H69/CPR, NCI-H69/LX10, NCI-H69/LX20, NCI-H69/LX4, NIH-3T3, NALM-1, NW-145, OPCN/OPCT cell lines, Peer, PNT-1A/PNT 2, RenCa, RIN-5F, RMA/RMAS, Saos-2 cells, Sf-9, SkBr3, T2, T-47D, T84, THP1 cell line, U373, U87, U937, VCaP, Vero cells, WM39, WT-49, X63, YAC-1, YAR, and transgenic varieties thereof. Cell lines are available from a variety of sources known to those with skill in the art (see, e.g., the American Type Culture Collection (ATCC) (Manassas, Va.)).

[0194] Further, the cell may be a fungus cell. As used herein, a “fungal cell” refers to any type of eukaryotic cell within the kingdom of fungi. Phyla within the kingdom of fungi include Ascomycota, Basidiomycota, Blastocladiomycota, Chytridiomycota, Glomeromycota, Microsporidia, and Neocallimastigomycota. Fungal cells may include yeasts, molds, and filamentous fungi. In some embodiments, the fungal cell is a yeast cell.

[0195] As used herein, the term “yeast cell” refers to any fungal cell within the phyla Ascomycota and Basidiomycota. Yeast cells may include budding yeast cells, fission yeast cells, and mold cells. Without being limited to these organisms, many types of yeast used in laboratory and industrial settings are part of the phylum Ascomycota. In some embodiments, the yeast cell is an S. cerervisiae, Kluyveromyces marxianus, or Issatchenkia orientalis cell. Other yeast cells may include without limitation Candida spp. (e.g., Candida albicans), Yarrowia spp. (e.g., Yarrowia hpolytica), Pichia spp. (e.g., Pichia pastoris), Kluyveromyces spp. (e.g., Kluyveromyces lactis and Kluyveromyces marxianus), Neurospora spp. (e.g., Neurospora crassa), Fusarium spp. (e.g., Fusarium oxysporum), and Issatchenkia spp. (e.g., Issatchenkia orientalis, a.k.a. Pichia kudriavzevii and Candida acidothermophilum). In some embodiments, the fungal cell is a filamentous fungal cell. As used herein, the term “filamentous fungal cell” refers to any type of fungal cell that grows in filaments, i.e., hyphae or mycelia. Examples of filamentous fungal cells may include without limitation Aspergillus spp. (e.g., Aspergillus niger), Trichoderma spp. (e.g., Trichoderma reesei), Rhizopus spp. (e.g., Rhizopus oryzae), and Mortierella spp. (e.g., Mortierella isabellina).

[0196] In some embodiments, the fungal cell is an industrial strain. As used herein, “industrial strain” refers to any strain of fungal cell used in or isolated from an industrial process, e.g., production of a product on a commercial or industrial scale. Industrial strain may refer to a fungal species that is typically used in an industrial process, or it may refer to an isolate of a fungal species that may be also used for non-industrial purposes (e.g., laboratory research). Examples of industrial processes may include fermentation (e.g., in production of food or beverage products), distillation, biofuel production, production of a compound, and production of a polypeptide. Examples of industrial strains can include, without limitation, JAY270 and ATCC4124.

[0197] In some embodiments, the fungal cell is a polyploid cell. As used herein, a “polyploid” cell may refer to any cell whose genome is present in more than one copy. A polyploid cell may refer to a type of cell that is naturally found in a polyploid state, or it may refer to a cell that has been induced to exist in a polyploid state (e.g., through specific regulation, alteration, inactivation, activation, or modification of meiosis, cytokinesis, or DNA replication). A polyploid cell may refer to a cell whose entire genome is polyploid, or it may refer to a cell that is polyploid in a particular genomic locus of interest.

[0198] In some embodiments, the fungal cell is a diploid cell. As used herein, a “diploid” cell may refer to any cell whose genome is present in two copies. A diploid cell may refer to a type of cell that is naturally found in a diploid state, or it may refer to a cell that has been induced to exist in a diploid state (e.g., through specific regulation, alteration, inactivation, activation, or modification of meiosis, cytokinesis, or DNA replication). For example, the S. cerevisiae strain S228C may be maintained in a haploid or diploid state. A diploid cell may refer to a cell whose entire genome is diploid, or it may refer to a cell that is diploid in a particular genomic locus of interest. In some embodiments, the fungal cell is a haploid cell. As used herein, a “haploid” cell may refer to any cell whose genome is present in one copy. A haploid cell may refer to a type of cell that is naturally found in a haploid state, or it may refer to a cell that has been induced to exist in a haploid state (e.g., through specific regulation, alteration, inactivation, activation, or modification of meiosis, cytokinesis, or DNA replication). For example, the S. cerevisiae strain S228C may be maintained in a haploid or diploid state. A haploid cell may refer to a cell whose entire genome is haploid, or it may refer to a cell that is haploid in a particular genomic locus of interest.

[0199] In some aspects, the cell is a cell obtained from a subject. In some embodiments, the subject is a healthy or non-diseased subject.

[0200] In some embodiments, a cell transfected with one or more vectors described herein is used to establish a new cell line comprising one or more vector-derived sequences. The cells can be used to produce the engineered systems. In some embodiments, the engineered systems are produced, harvested, and delivered to a subject in need thereof. In some embodiments, the engineered cells are delivered to a subject. Other uses for the engineered cells are described elsewhere herein.

[0201] In some aspects, the present disclosure also provides tissues, organs, or subjects (e.g., animals, plants, etc.) comprising one or more cells described above.

### Engineered Animals

[0202] The present disclosure further provides engineered organisms that comprise the systems, polynucleotides, and/or vectors. The engineered organism, in some embodiments, can be an animal; for example, a mammal. In aspects, the organism is a non-human mammal. In an aspect, the invention provides a non-human eukaryotic organism; e.g., a multicellular eukaryotic organism, comprising a eukaryotic engineered cell according to any of the described embodiments. In other aspects, the invention provides a eukaryotic organism, preferably a multicellular eukaryotic organism, comprising a eukaryotic host cell according to any of the described embodiments. The engineered organism in some embodiments of these aspects may be an animal, for example, a mammal. In some embodiments, the engineered organism can be an arthropod such as an insect. In some embodiments, the engineered organism can be a farm or other production animals, including but not limited to pigs, goats, cattle, chickens, and sheep.

[0203] Various methods of generating transgenic animals that contain exogenous genetic material can be generated by various methods that will be appreciated by those of ordinary skill in the art. Such techniques include, but are not limited to, polynucleotide or virus microinjection into a pronucleus in a developing embryo, cell cytoplasm, or into the vasculature or blastoderm of a developing embryo (for example, in chickens); embryonic stem cell or other stem cell (e.g. pluripotent, multipotent, or induced pluripotent stem cell) manipulation (e.g. introduction of transgene or modification via gene editing); techniques utilizing a cre-lox approach, viral vectors, nuclear transfer, primoridial germ cell manipulation, spermatogonial manipulation. Many variations of these basic techniques have been done and are included within the scope of this disclosure. Exemplary methods for generating various transgenic animals can be found, for example, in any of the following, which are incorporated by reference as if expressed in their entirety: “Transgenic Animal Science: Principles and Methods” (1991) Charles River Laboratory; Hammer R. E, Pursel V. G, et al: Production of transgenic rabbits, sheep and pigs by microinjection. Nature 1985; 315(6021):680-683; Jaenisch R: Germ line integration and Mendelian transmission of the exogenous Moloney leukemia virus. Proc Natl Acad Sci.1976; 73:1260-1264; Brackett B G, Boranska W, Sawicki W, Koprowski: Uptake of heterologous genome by mammalian spermatozoa and its transfer to ova through fertilization. Proc Natl Acad Sci.1971; 68:353-357; Gordon J. W, Scangos G. A, Plotkin D. J, Barbosa J. A, Ruddle F. H: Genetic transformation of mouse embryos by microinjection of purified DNA. Proc Natl Acad Sci.1980; 77:179-184; Lavitrano M, Camaioni A, Fazio V. M, Dolci S, Farace M. G, Spadafora C: Sperm cells as vectors for introducing foreign DNA into eggs: genetic transformation of mice. Cell 1989; 57(5):717-723; Chang K, Qian J, et al: Effective generation of transgenic pigs and mice by linker based sperm-mediated gene transfer. BMC Biotechnol. 2002; 2(1):5; Perry A. C, Wakayama T, Kishikawa H, Kasai T, Okabe M, Toyoda Y, Yanagimachi R: Mammalian transgenesis by intracytoplasmic sperm injection. Science 1999; 284 (5417):1180-1183; Clark J, Whitelaw B: A future for transgenic livestock. Rev. Genet. 2003; 4(10):825-833; Bowen R. A: Efficient production of transgenic cattle by retroviral infection of early embryos. Reprod. Dev. 1995; 40(3):386-390; Shim H, Gutierrez-Adan A, Chen L. R, BonDurant R. H, Behboodi E, Anderson G. B: Isolation of pluripotent stem cells from cultured porcine primordial germ cells. Reprod. 1997; 57(5):1089-1095; Maclean, N: Animals with Novel Genes. Cambridge University Press. Cambridge, UK, 1995; Ebert, K. M, and Schindler J. E. S: Transgenic farm animals: Progress report. Theriogenology 1993; 39: 121-135; Gossler et al: Transgenesis by means of blastocyst-derived embryonic stem cell line, Proceedings of National Academic Science 1986; 83:9065-9069; Makoto Nagano, Clayton J. Brinster, et al: Transgenic mice produced by retroviral transduction of male germ-line stem cells. PNAS2001; 98(23):13090-13095; Alexander Baguisi et al: Production of goats by somatic cell nuclear transfer. Nature Biotechnology 1999; 17:456; Esponda P: Transfection of gametes. A method to generate transgenic animals. J. Morphol. 2005; 23(3):281-284; Andreas Sched, Zonia Larin, et al: A method for the generation of YAC transgenic mice by pronuclear microinjection. Nucleic Acids Research1993; 21(20):4783-4787; Ralph L. Brinster. Germline Stem Cell Transplantation and Transgenesis. Reproductive Biology Journal 2002; 296:2174; Hofmann A, Zakhartchenko V, et al: Generation of transgenic cattle by lentiviral gene transfer into oocytes. Reprod. 2004; 71(2):405-409; Sang H. M: Transgenics, chickens and therapeutic proteins. Vox Sanguinis. 2004; 87(2):S164-5166; Meade H. M, Echelard Y, et al: Expression of recombinant proteins in the milk of transgenic animals. In Gene expression systems: using nature for the art of expression. Academic Press, San Diego. 1999; 399-427; Rudolph N. S: Biopharmaceutical production in transgenic livestock. Trends Biotechnol. 1999; 17(9):367-374; Kuroiwa Y, Kasinathan P, et al: Cloned transchromosomic calves producing human immunoglobulin. Nature Biotechnol. 2002; 20(9):889-894; Swabson M. E, Martin M. J, et al: Production of functional human hemoglobin in transgenic swine. Biotechnology 1992; 10(5):557-559, Niemann H: Transgenic pigs expressing plant genes. natl Acad. Sci.2004; 101(19):7211-7212.

### Engineered Plants and Algae

[0204] The engineered organism, in some embodiments, can be a plant and algae that comprise the systems, polynucleotides, and/or vectors. In general, the term “plant” relates to any various photosynthetic, eukaryotic, unicellular or multicellular organism of the kingdom Plantae characteristically growing by cell division, containing chloroplasts, and having cell walls comprised of cellulose. The term plant encompasses monocotyledonous and dicotyledonous plants. In some embodiments, the engineered plant is a dicotyledonous plant belonging to the orders Magniolales, Illiciales, Laurales, Piperales, Aristochiales, Nymphaeales, Ranunculales, Papeverales, Sarraceniaceae, Trochodendrales, Hamamelidales, Eucomiales, Leitneriales, Myricales, Fagales, Casuarinales, Caryophyllales, Batales, Polygonales, Plumbaginales, Dilleniales, Theales, Malvales, Urticales, Lecythidales, Violales, Salicales, Capparales, Ericales, Diapensales, Ebenales, Primulales, Rosales, Fabales, Podostemales, Haloragales, Myrtales, Cornales, Proteales, San tales, Rafflesiales, Celastrales, Euphorbiales, Rhamnales, Sapindales, Juglandales, Geraniales, Polygalales, Umbellales, Gentianales, Polemoniales, Lamiales, Plantaginales, Scrophulariales, Campanulales, Rubiales, Dipsacales, and Asterales. In some embodiments, the plant is a monocotyledonous plant such as one belonging to an order of the group of: Alismatales, Hydrocharitales, Najadales, Triuridales, Commelinales, Eriocaulales, Restionales, Poales, Juncales, Cyperales, Typhales, Bromeliales, Zingiberales, Arecales, Cyclanthales, Pandanales, Arales, Lilliales, and Orchid ales, or with plants belonging to Gymnospermae, e.g. those belonging to the orders Pinales, Ginkgoales, Cycadales, Araucariales, Cupressales and Gnetales. In some embodiments, the engineered plant can be a plant of a species included in the non-limitative list of dicot, monocot or gymnosperm genera hereunder: Atropa, Alseodaphne, Anacardium, Arachis, Beilschmiedia, Brassica, Carthamus, Cocculus, Croton, Cucumis, Citrus, Citrullus, Capsicum, Catharanthus, Cocos, Coffea, Cucurbita, Daucus, Duguetia, Eschscholzia, Ficus, Fragaria, Glaucium, Glycine, Gossypium, Helianthus, Hevea, Hyoscyamus, Lactuca, Landolphia, Linum, Litsea, Lycopersicon, Lupinus, Manihot, Majorana, Malus, Medicago, Nicotiana, Olea, Parthenium, Papaver, Persea, Phaseolus, Pistacia, Pisum, Pyrus, Prunus, Raphanus, Ricinus, Senecio, Sinomenium, Stephania, Sinapis, Solanum, Theobroma, Trifolium, Trigonella, Vicia, Vinca, Vilis, and Vigna; and the genera Allium, Andropogon, Aragrostis, Asparagus, Avena, Cynodon, Elaeis, Festuca, Festulolium, Heterocallis, Hordeum, Lemna, Lolium, Musa, Oryza, Panicum, Pannesetum, Phleum, Poa, Secale, Sorghum, Triticum, Zea, Abies, Cunninghamia, Ephedra, Picea, Pinus, and Pseudotsuga.

[0205] Specifically, the engineered plants are intended to include without limitation angiosperm and gymnosperm plants such as acacia, alfalfa, amaranth, apple, apricot, artichoke, ash tree, asparagus, avocado, banana, barley, beans, beet, birch, beech, blackberry, blueberry, broccoli, Brussel's sprouts, cabbage, canola, cantaloupe, carrot, cassava, cauliflower, cedar, a cereal, celery, chestnut, cherry, Chinese cabbage, citrus, clementine, clover, coffee, corn, cotton, cowpea, cucumber, cypress, eggplant, elm, endive, eucalyptus, fennel, figs, fir, geranium, grape, grapefruit, groundnuts, ground cherry, gum hemlock, hickory, kale, kiwifruit, kohlrabi, larch, lettuce, leek, lemon, lime, locust, pine, maidenhair, maize, mango, maple, melon, millet, mushroom, mustard, nuts, oak, oats, oil palm, okra, onion, orange, an ornamental plant or flower or tree, papaya, palm, parsley, parsnip, pea, peach, peanut, pear, peat, pepper, persimmon, pigeon pea, pine, pineapple, plantain, plum, pomegranate, potato, pumpkin, radicchio, radish, rapeseed, raspberry, rice, rye, sorghum, safflower, sallow, soybean, spinach, spruce, squash, strawberry, sugar beet, sugarcane, sunflower, sweet potato, sweet corn, tangerine, tea, tobacco, tomato, trees, triticale, turf grasses, turnips, vine, walnut, watercress, watermelon, wheat, yams, yew, and zucchini.

[0206] The term plant also encompasses Algae, which are mainly photoautotrophs unified primarily by their lack of roots, leaves and other organs that characterize higher plants. Thus, in some embodiments, the modified organism is an algae. “Algae” and “algae cells,” include but are not limited to, algae or cells thereof selected from several eukaryotic phyla, including the Rhodophyta (red algae), Chlorophyta (green algae), Phaeophyta (brown algae), Bacillariophyta (diatoms), Eustigmatophyta and dinoflagellates as well as the prokaryotic phylum Cyanobacteria (blue-green algae). The term “algae” includes for example algae selected from Amphora, Anabaena, Anikstrodesmis, Botryococcus, Chaetoceros, Chlamydomonas, Chlorella, Chlorococcum, Cyclotella, Cylindrotheca, Dunaliella, Emiliana, Euglena, Hematococcus, Isochrysis, Monochrysis, Monoraphidium, Nannochloris, Nannnochloropsis, Navicula, Nephrochloris, Nephroselmis, Nitzschia, Nodularia, Nostoc, Oochromonas, Oocystis, Oscillartoria, Pavlova, Phaeodactylum, Playtmonas, Pleurochrysis, Porhyra, Pseudoanabaena, Pyramimonas, Stichococcus, Synechococcus, Synechocystis, Tetraselmis, Thalassiosira, and Trichodesmium.

[0207] As noted above, part of the plant may be engineered to include and/or express one or more components of the engineered system described herein. As used herein, “plant tissue” refers to part of the plant and includes cells. The term “plant cell” as used herein refers to individual units of a living plant, either in an intact whole plant or in an isolated form grown in in vitro tissue cultures, on media or agar, in suspension in a growth media or buffer or as a part of higher organized unites, such as, for example, plant tissue, a plant organ, or a whole plant.

[0208] As used herein, “protoplast” refers to a plant cell that has had its protective cell wall completely or partially removed using, for example, mechanical or enzymatic means resulting in an intact biochemical competent unit of living plant that can reform their cell wall, proliferate and regenerate grow into a whole plant under proper growing conditions.

### Therapeutic and Diagnostic Applications

[0209] In another aspect, the present disclosure provides methods for treating diseases or conditions in a subject with the systems described herein. In some embodiments, the methods comprise administering one or more components of the systems, the polynucleotides, the vectors the cells, or any combination thereof, to a subject (e.g., a subject in need thereof). The systems may comprise or may cause production of therapeutic and/or diagnostic agents, such as the genetic modulating agents. in certain examples, the methods may comprise administering one or more cells comprising the vesicles or plasmids into a subject.

[0210] The diseases may be genetic diseases. Genetic diseases that can be treated are discussed in greater detail elsewhere herein. Other diseases include but are not limited to any of the following: cancer, Acubetivacter infections, actinomycosis, African sleeping sickness, AIDS/HIV, ameobiasis, Anaplasmosis, Angiostrongyliasis, Anisakiasis, Anthrax, Acranobacterium haemolyticum infection, Argentine hemorrhagic fever, Ascariasis, Aspergillosis, Astrovirus infection, Babesiosis, Bacterial meningitis, Bacterial pneumonia, Bacterial vaginosis, Bacteroides infection, balantidiasis, Bartonellosis, Baylisascaris infection, BK virus infection, Black Piedra, Blastocytosis, Blastomycosis, Bolivian hemorrhagic fever, Botulism, Brazilian hemorrhagic fever, brucellosis, Bubonic plague, Burkholderia infection, buruli ulcer, calicivirus invention, campylobacteriosis, Candidiasis, Capillariasis, Carrion's disease, Cat-scratch disease, cellulitis, Chagas Disease, Chancroid, Chickenpox, Chikungunya, Chlamydia, Chlamydia pneumoniae, Cholera, Chromoblastomycosis, Chytridiomycosis, Clonochiasis, Clostridium difficile colitis, Coccidioidomycosis, Colorado tick fever, rhinovirus/coronavirus infection (common cold), Cretzfeldt-Jakob disease, Crimean-congo hemorrhagic fever, Cryptococcosis, Cryptosporidiosis, Cutaneous larva migrans (CLM), cyclosporiasis, cysticercosis, cytomegalovirus infection, Dengue fever, Desmodesmus infection, Dientamoebiasis, Diphtheria, Diphylobothriasis, Dracunculiasis, Ebola, Echinococcosis, Ehrlichiosis, Enterobiasis, Enterococcus infection, Enterovirus infection, Epidemic typhus, Erthemia Infectisoum, Exanthem subitum, Fasciolasis, Fasciolopsiasis, fatal familial insomnia, filarisis, Clostridum perfingens infection, Fusobacterium infection, Gas gangrene (clostridial myonecrosis), Geotrichosis, Gerstmann-Straussler-Scheinker syndrome, Giardasis, Glanders, Gnathostomiasis, Gonorrhea, Granuloma inguinales, Group A streptococcal infection, Group B streptococcal infection, Haemophilus influenzae infection, Hand, foot, and mouth disease, hanta virus pulmonary syndrome, heartland virus disease, Helicobacter pylori infection, hemorrhagi fever with renal syndrome, Hendra virus infection, Hepatitis (all groups A, B, C, D, E), herpes simplex, histoplasmosis, hookworm infection, human bocavirus infection, human ewingii ehrlichiosis, Human granulocytic anaplasmosis, human metapneumovirus infection, human monocytic ehrlichiosis, human papilloma virus, Hymenolepiasis, Epstein-Barr infection, mononucleosis, influenza, isoporisis, Kawasaki disease, Kingell kingae infection, Kuru, Lasas fever, Legionellosis (Legionnaire's disease and Potomac Fever), Leishmaniasis, Leprosy, Leptospirosis, Listeriosis, Lyme disease, lymphatic filariasis, lymphocytic choriomeningitis, Malaria, Marburg hemorrhagic fever, measles, Middle East respiratory syndrome, Melioidosis, meningitis, Meningococcal disease, Metagonimiasis, Microsporidosis, Molluscum contagiosum, Monkeypox, Mumps, Murine typhus, Mycoplasma pneumonia, Mycoplasma genitalium infection, Mycetoma, Myiasis, Conjunctivitis, Nipah virus infection, Norovirus, Variant Creutzfeldt-Jakob disease, Nocardosis, Onchocerciasis, Opisthorchiasis, Paracoccidioidomycosis, Paragonimiasis, Pasteurellosis, Pediculosis capitis, Pediculosis corporis, Pediculosis pubis, pelvic inflammatory disease, pertussis, plague, pneumococcal infection, pneumocystis pneumonia, pneumonia, poliomyelitis, prevotella infection, primary amoebic meningoencephalitis, progressive multifocal leukoencephalopathy, Psittacosis, Qfever, rabies, relapsing fever, respiratory syncytial virus infection, rhinovirus infection, rickettsial infection, Rickettsia pox, Rift Valley Fever, Rocky Mountain Spotted Fever, Rotavirus infection, Rubella, Salmonellosis, SARS, Scabies, Scarlet fever, Schistosomiasis, Sepsis, Shigellosis, Shingles, Smallpox, Sporotrichosis, Staphylococcal infection (including MRSA), strongyloidiasis, subacute sclerosing panencephalitis, Syphilis, Taeniasis, tetanus, Trichophyton species infection, Tocariasis, Toxoplasmosis, Trachoma, Trichinosis, Trichuriasis, Tuberculosis, Tularemia, Typhoid Fever, Typhus Fever, Ureaplasma urealyticum infection, Valley fever, Venezuelan equine encephalitis, Venezuelan hemorrhagic fever, Vibrio species infection, Viral pneumonia, West Nile Fever, White Piedra, Yersinia pseudotuberculosis, Yersiniosis, Yellow fever, Zeaspora, Zika fever, Zygomycosis and combinations thereof.

[0211] Other diseases and disorders that can be treated using embodiments of the present invention include endocrine diseases (e.g. Type I and Type II diabetes, gestational diabetes, hypoglycemia. Glucagonoma, Goiter, Hyperthyroidism, hypothyroidism, thyroiditis, thyroid cancer, thyroid hormone resistance, parathyroid gland disorders, Osteoporosis, osteitis deformans, rickets, ostomalacia, hypopituitarism, pituitary tumors, etc.), skin conditions of infections and non-infection origin, eye diseases of infectious or non-infectious origin, gastrointestinal disorders of infectious or non-infectious origin, cardiovascular diseases of infectious or non-infectious origin, brain and neuron diseases of infectious or non-infectious origin, nervous system diseases of infectious or non-infectious origin, muscle diseases of infectious or non-infectious origin, bone diseases of infectious or non-infectious origin, reproductive system diseases of infectious or non-infectious origin, renal system diseases of infectious or non-infectious origin, blood diseases of infectious or non-infectious origin, lymphatic system diseases of infectious or non-infectious origin, immune system diseases of infectious or non-infectious origin, mental-illness of infectious or non-infectious origin and the like.

[0212] In some embodiments, the disease may be neuronal diseases. The systems herein may be delivered to neuronal cells or related cells for treating such diseases. Examples of diseases and cells include those described in Bergen J M et al., Nonviral Approaches for Neuronal Delivery of Nucleic Acids, Pharm Res. 2008 May; 25(5): 983-998.

### Pharmaceutical Compositions

[0213] The systems, polynucleotides, vectors, and cells herein may be formulated as pharmaceutical compositions. A pharmaceutical composition may comprise an excipient, such as a pharmaceutically acceptable carrier, that is conventional in the art and that is suitable for administration to cells or to a subject.

[0214] In certain embodiments, the methods of the disclosure include administering to a subject in need thereof an effective amount (e.g., therapeutically effective amount or prophylactically effective amount) of the treatments provided herein. Such treatment may be supplemented with other known treatments, such as surgery on the subject. In certain embodiments, the surgery is strictureplasty, resection (e.g., bowel resection, colon resection), colectomy, surgery for abscesses and fistulas, proctocolectomy, restorative proctocolectomy, vaginal surgery, cataract surgery, or a combination thereof.

[0215] The term “pharmaceutically acceptable” as used throughout this specification is consistent with the art and means compatible with the other ingredients of a pharmaceutical composition and not deleterious to the recipient thereof. As used herein, “carrier” or “excipient” includes any and all solvents, diluents, buffers (such as, e.g., neutral buffered saline or phosphate buffered saline), solubilisers, colloids, dispersion media, vehicles, fillers, chelating agents (such as, e.g., EDTA or glutathione), amino acids (such as, e.g., glycine), proteins, disintegrants, binders, lubricants, wetting agents, emulsifiers, sweeteners, colorants, flavourings, aromatisers, thickeners, agents for achieving a depot effect, coatings, antifungal agents, preservatives, stabilisers, antioxidants, tonicity controlling agents, absorption delaying agents, and the like. The use of such media and agents for pharmaceutical active components is well known in the art. Such materials should be non-toxic and should not interfere with the activity of the cells or active components.

[0216] The precise nature of the carrier or excipient or other material will depend on the route of administration. For example, the composition may be in the form of a parenterally acceptable aqueous solution, which is pyrogen-free and has suitable pH, isotonicity and stability. For general principles in medicinal formulation, the reader is referred to Cell Therapy: Stem Cell Transplantation, Gene Therapy, and Cellular Immunotherapy, by G. Morstyn & W. Sheridan eds., Cambridge University Press, 1996; and Hematopoietic Stem Cell Therapy, E. D. Ball, J. Lister & P. Law, Churchill Livingstone, 2000.

[0217] The pharmaceutical compositions can be applied parenterally, rectally, orally or topically. For example, the pharmaceutical composition may be used for intravenous, intramuscular, subcutaneous, peritoneal, peridural, rectal, nasal, pulmonary, mucosal, or oral application. In a preferred embodiment, the pharmaceutical composition according to the invention is intended to be used as an infuse. The skilled person will understand that compositions which are to be administered orally or topically will usually not comprise cells, although it may be envisioned for oral compositions to also comprise cells, for example when gastro-intestinal tract indications are treated. Each of the cells or active components (e.g., modulants, immunomodulants, antigens) as discussed herein may be administered by the same route or may be administered by a different route. By means of example, and without limitation, cells may be administered parenterally and other active components may be administered orally. In some cases, the composition or pharmaceutical composition may by intramuscular injection. In some cases, the composition or pharmaceutical composition may by intravascular injection.

[0218] Liquid pharmaceutical compositions may generally include a liquid carrier such as water or a pharmaceutically acceptable aqueous solution. For example, physiological saline solution, tissue or cell culture media, dextrose or other saccharide solution or glycols such as ethylene glycol, propylene glycol or polyethylene glycol may be included.

[0219] The composition may include one or more cell protective molecules, cell regenerative molecules, growth factors, anti-apoptotic factors or factors that regulate gene expression in the cells. Such substances may render the cells independent of their environment.

[0220] Such pharmaceutical compositions may contain further components ensuring the viability of the cells therein. For example, the compositions may comprise a suitable buffer system (e.g., phosphate or carbonate buffer system) to achieve desirable pH, more usually near neutral pH, and may comprise sufficient salt to ensure isoosmotic conditions for the cells to prevent osmotic stress. For example, suitable solution for these purposes may be phosphate-buffered saline (PBS), sodium chloride solution, Ringer's Injection or Lactated Ringer's Injection, as known in the art. Further, the composition may comprise a carrier protein, e.g., albumin (e.g., bovine or human albumin), which may increase the viability of the cells.

[0221] Further suitably pharmaceutically acceptable carriers or additives are well known to those skilled in the art and for instance may be selected from proteins such as collagen or gelatine, carbohydrates such as starch, polysaccharides, sugars (dextrose, glucose and sucrose), cellulose derivatives like sodium or calcium carboxymethylcellulose, hydroxypropyl cellulose or hydroxypropylmethyl cellulose, pregelatinized starches, pectin agar, carrageenan, clays, hydrophilic gums (acacia gum, guar gum, arabic gum and xanthan gum), alginic acid, alginates, hyaluronic acid, polyglycolic and polylactic acid, dextran, pectins, synthetic polymers such as water-soluble acrylic polymer or polyvinylpyrrolidone, proteoglycans, calcium phosphate and the like.

[0222] If desired, cell preparation can be administered on a support, scaffold, matrix or material to provide improved tissue regeneration. For example, the material can be a granular ceramic, or a biopolymer such as gelatine, collagen, or fibrinogen. Porous matrices can be synthesized according to standard techniques (e.g., Mikos et al., Biomaterials 14: 323, 1993; Mikos et al., Polymer 35:1068, 1994; Cook et al., J. Biomed. Mater. Res. 35:513, 1997). Such support, scaffold, matrix or material may be biodegradable or non-biodegradable. Hence, the cells may be transferred to and/or cultured on suitable substrate, such as porous or non-porous substrate, to provide for implants.

[0223] The pharmaceutical compositions may comprise one or more pharmaceutically acceptable salts. The term “pharmaceutically acceptable salts” refers to salts prepared from pharmaceutically acceptable non-toxic bases or acids including inorganic or organic bases and inorganic or organic acids. Salts derived from inorganic bases include aluminum, ammonium, calcium, copper, ferric, ferrous, lithium, magnesium, manganic salts, manganous, potassium, sodium, zinc, and the like. Particularly preferred are the ammonium, calcium, magnesium, potassium, and sodium salts. Salts derived from pharmaceutically acceptable organic non-toxic bases include salts of primary, secondary, and tertiary amines, substituted amines including naturally occurring substituted amines, cyclic amines, and basic ion exchange resins, such as arginine, betaine, caffeine, choline, N,N′-dibenzylethylenediamine, diethylamine, 2-diethylaminoethanol, 2-dimethylaminoethanol, ethanolamine, ethylenediamine, N-ethyl-morpholine, N-ethylpiperidine, glucamine, glucosamine, histidine, hydrabamine, isopropylamine, lysine, methylglucamine, morpholine, piperazine, piperidine, polyamine resins, procaine, purines, theobromine, triethylamine, trimethylamine, tripropylamine, tromethamine, and the like. The term “pharmaceutically acceptable salt” further includes all acceptable salts such as acetate, lactobionate, benzenesulfonate, laurate, benzoate, malate, bicarbonate, maleate, bisulfate, mandelate, bitartrate, mesylate, borate, methylbromide, bromide, methylnitrate, calcium edetate, methyl sulfate, camsylate, mucate, carbonate, napsylate, chloride, nitrate, clavulanate, N-methylglucamine, citrate, ammonium salt, dihydrochloride, oleate, edetate, oxalate, edisylate, pamoate (embonate), estolate, palmitate, esylate, pantothenate, fumarate, phosphate/diphosphate, gluceptate, polygalacturonate, gluconate, salicylate, glutamate, stearate, glycollylarsanilate, sulfate, hexylresorcinate, subacetate, hydrabamine, succinate, hydrobromide, tannate, hydrochloride, tartrate, hydroxynaphthoate, teoclate, iodide, tosylate, isothionate, triethiodide, lactate, panoate, valerate, and the like which can be used as a dosage form for modifying the solubility or hydrolysis characteristics or can be used in sustained release or pro-drug formulations. It will be understood that, as used herein, references to specific agents (e.g., neuromedin U receptor agonists or antagonists), also include the pharmaceutically acceptable salts thereof.

[0224] Methods of administrating the pharmacological compositions, including agents, cells, agonists, antagonists, antibodies or fragments thereof, to an individual include, but are not limited to, intradermal, intrathecal, intramuscular, intraperitoneal, intravenous, subcutaneous, intranasal, epidural, by inhalation, and oral routes. The compositions can be administered by any convenient route, for example by infusion or bolus injection, by absorption through epithelial or mucocutaneous linings (for example, oral mucosa, rectal and intestinal mucosa, and the like), ocular, and the like and can be administered together with other biologically-active agents. Administration can be systemic or local. In addition, it may be advantageous to administer the composition into the central nervous system by any suitable route, including intraventricular and intrathecal injection. Pulmonary administration may also be employed by use of an inhaler or nebulizer, and formulation with an aerosolizing agent. It may also be desirable to administer the agent locally to the area in need of treatment; this may be achieved by, for example, and not by way of limitation, local infusion during surgery, topical application, by injection, by means of a catheter, by means of a suppository, or by means of an implant.

[0225] Therapy or treatment according to the invention may be performed alone or in conjunction with another therapy, and may be provided at home, the doctor's office, a clinic, a hospital's outpatient department, or a hospital. Treatment generally begins at a hospital so that the doctor can observe the therapy's effects closely and make any adjustments that are needed. The duration of the therapy depends on the age and condition of the patient, the stage of the cancer, and how the patient responds to the treatment. Additionally, a person having a greater risk of developing an inflammatory response (e.g., a person who is genetically predisposed or predisposed to allergies or a person having a disease characterized by episodes of inflammation) may receive prophylactic treatment to inhibit or delay symptoms of the disease.

### Vaccines

[0226] The systems, vesicles, plasmids, and cells may be used as vaccines. In some examples, the vesicles may comprise molecules capable of eliciting T cell and B cell immune responses. In some examples, the vesicles may not replicate once delivered in a target cell.

### Bioproduction

[0227] The engineered system molecules, vectors, engineered cells, and/or engineered systems can be used for bioproduction of various molecules including engineered systems. In some embodiments, the engineered cells can be used in an in vivo (e.g. a modified animal or plant), in vitro, or ex vivo cell system to produce engineered systems. As previously mentioned, the engineered system molecules, vectors, engineered cells, and/or engineered systems can be used to make a modified animal that can produce engineered systems. In some embodiments, the animal can be engineered to produce engineered systems in one or more bodily fluids or product (e.g. an egg as in the case of modified avians). As previously mentioned, the engineered system molecules, vectors, engineered cells, and/or engineered systems can be used to make a modified plant that can produce engineered systems. In some embodiments, the plant can be engineered to produce engineered systems in one or more parts of the plant. In some embodiments, production can be in a harvestable portion of the plant.

[0228] In some embodiments, the objective can be to make and/or harvest a particular molecule from a producer cell. This can be useful for generating and harvesting molecules that are otherwise difficult to generate and/or harvest outside of a cell or via other processes and techniques. In some embodiments, the molecule is one that is naturally produced by the producer cell (which can be an engineered cell). In some embodiments, the producer cell can be engineered to increase production of one or more endogenous molecules. In some embodiments, the producer cell is engineered to produce an exogenous molecule. In some embodiments, endogenous and/or exogenous molecules produced can be packaged into engineered systems, which can be subsequently harvested from the producer cell. The molecules can then be further harvested from the engineered systems. Methods of purifying engineered systems are described elsewhere herein and will be appreciated by those of ordinary skill in the art. Similarly, methods of harvesting the molecules from the engineered systems will be appreciated by those of ordinary skill in the art.

[0229] In some cases, endogenous producer cell molecules or exogenous molecules of interest are normally secreted by the producer cell. Packaging these into engineered systems prior to secretion followed by subsequent purification of the engineered systems carrying the packaged endogenous molecule can be an alternative to obtaining conditioned media to obtain these normally secreted endogenous molecules.

[0230] The systems (e.g., the systems comprising ATPase(s) and adenosine deaminase(s) described herein) may be used to modify polynucleotides in vitro, in cells, and in vivo. Examples of applications, e.g., in plants, fungi, animals, therapeutic and diagnostic applications, include those described in International Patent Publication Nos. WO 2019/071048 (e.g. paragraphs [0528]-[0837]), WO 2019/084063 (e.g., paragraphs [0676]-[0892]), which are incorporated by reference herein in their entireties.

### Delivery

[0231] The one or more components of the systems herein may be introduced to cells for expression. Examples of methods of introducing the components into cell include lipofection, nucleofection, microinjection, biolistics, virosomes, liposomes, immunoliposomes, polycation or lipid:nucleic acid conjugates, naked DNA, artificial virions, and agent-enhanced uptake of DNA. Lipofection is described in e.g., U.S. Pat. Nos. 5,049,386, 4,946,787; and 4,897,355) and lipofection reagents are sold commercially (e.g., Transfectam™ and Lipofectin™). Cationic and neutral lipids that are suitable for efficient receptor-recognition lipofection of polynucleotides include those of Felgner, WO 91/17424; WO 91/16024. Delivery can be to cells (e.g. in vitro or ex vivo administration) or target tissues (e.g. in vivo administration). Physical methods of introducing polynucleotides may also be used. Examples of such methods include injection of a solution containing the polynucleotides, bombardment by particles covered by the polynucleotides, soaking a cell, tissue sample or organism in a solution of the polynucleotides, or electroporation of cell membranes in the presence of the polynucleotides. Examples of delivery methods and vehicles include viruses, nanoparticles, exosomes, nanoclews, liposomes, lipids (e.g., LNPs), supercharged proteins, cell permeabilizing peptides, and implantable devices. The nucleic acids, proteins and other molecules, as well as cells described herein may be delivered to cells, tissues, organs, or subjects using methods described in paragraphs [00117] to [00278] of Feng Zhang et al., (WO2016106236A1), which is incorporated by reference herein in its entirety.

### EXAMPLES

### Example 1—Identification of Bacterial Defense Systems

[0232] Bacterial defense systems were identified using method outlined in FIG. 5, FIGS. 6A-6B show the examples of the identified bacterial defense systems, their domain structures, and their effects on phage growth. Selected identified bacterial defense systems and mutated forms were tested for their effects on phage growth (FIG. 7).

### Example 2—Diverse Enzymatic Functions Mediate Antiviral Immunity in Prokaryotes

[0233] Bacteria and archaea possess multiple defense systems to protect against attacking viruses and other foreign genetic elements through a variety of mechanisms, including sequence-specific endonucleases and toxin-antitoxin systems. Here, using a systematic approach to identify defense-associated genes in bacterial and archaeal genomes, Applicants identified a diverse set of putative defense gene cassettes that remain functionally uncharacterized. Applicants heterologously reconstituted 50 of these cassettes in Escherichia coli, demonstrating that 29 of them mediated defense against specific bacteriophages. These new defense systems include retrons; a widespread family of reverse transcriptases with unusual domain associations; and STAND ATPases, which are homologs of essential eukaryotic apoptosis effectors but whose role in prokaryotes has remained enigmatic. In addition, Applicants demonstrated that a two-gene system containing a divergent adenosine deaminase mediates RNA editing upon exposure to phage, representing a novel mechanism of defense. The discovery of these novel defense systems highlighted the immense untapped diversity of molecular functions employed by microbes in their wars against viruses and provides clues to the evolutionary origins of microbial immune mechanisms.

[0234] Bacterial and archaeal viruses are the most abundant, and possibly the most diverse, biological entities on earth (Cobián Güemes et al., 2016; Suttle, 2013). To defend against the incessant and varied virus attacks, prokaryotes have evolved multiple, diverse antivirus defense systems. These include the adaptive immune systems CRISPR-Cas, which provide immunity by memorizing past infection events (Hille et al., 2018), and a variety of innate immune systems, such as restriction-modification (RM)-based systems, including DNA phosphorothioation, DPD, DISARM (Ofir et al., 2018), and BREX (Goldfarb et al., 2015; Gordeeva et al., 2019), which target specific, pre-defined sequences within the phage DNA; abortive infection (Abi) systems, which induce altruistic cell dormancy or death upon phage infection; and additional systems with mechanisms that have not yet been investigated (Doron et al. 2018). Antivirus defense systems range in complexity from a single small protein (e.g., certain types of Abi systems) to large cassettes of eight or more proteins acting in concert (e.g., type I and type III CRISPR-Cas systems).

[0235] The arms race between microbes and viruses is a powerful evolutionary force that sculpts the host genomes. A distinctive outcome of this process is the modularity of defense systems, whereby components of one system are often recruited by other systems. For example, restriction-modification enzymes have been found in association with a number of additional proteins, leading to expanded defense systems, such as DISARM (Ofir et al., 2018). Toxin-antitoxin systems are particularly prone to swapping, resulting in nearly every possible combination of toxin and antitoxin (Makarova et al., 2013). Another key feature of the evolution of microbial anti-parasite defense is the persistent exchange of components between defense systems and mobile genetic elements (Koonin et al., 2019). In particular, nucleases encoded by both transposons and toxin-antitoxin modules apparently have been recruited for roles in CRISPR-Cas systems, and conversely, components of CRISPR-Cas systems have been recruited by mobile genetic elements for antidefense and other functions, such as RNA-guided transpositions (Faure et al., 2019; Klompe et al., 2019; Strecker et al., 2019). The extensive modularity and baroque evolutionary patterns of defense systems yield extraordinary diversity and highlight the potential for discovery of additional systems with novel mechanisms.

### Domain-Independent Identification of Uncharacterized Defense Systems

[0236] A distinctive property of anti-phage defense genes is their tendency to cluster together within defense ‘islands’ in bacterial and archaeal genomes (Makarova et al., 2013; Makarova et al., 2011). As a consequence, an uncharacterized gene whose homologs consistently occur next to, for instance, restriction-modification genes has an increased probability of being a new defense gene (Shmakov et al., 2019; Shmakov et al., 2018). A recent analysis (Doron et al., 2018) identified and validated 10 new defense systems, based on the requirement that each (putative) system contain at least one annotated protein domain that is enriched within defense islands.

[0237] To test whether additional unknown systems existed which either lack annotated domains, or only contain domains that are typically non-defense but have been co-opted in specific instances to perform defensive functions, Applicants developed an expanded computational approach in which putative novel systems were identified independent of domain annotations (FIG. 8A). Applicants analyzed all 174,080 bacterial and archaeal genomes available in Genbank as of November 2018, encoding a total of 620 million proteins. To identify candidate novel defense systems, Applicants first compiled a list of all proteins within 10 kb or 10 open reading frames of known defense systems (see Methods). This list (n=6×10⁵ after redundancy reduction) was a mix of novel defense genes with many non-defense genes. For each entry in the list (‘seed’), Applicants identified all homologs within the original set of genomes with an alignment coverage of at least 70% and an E-value of 10⁻⁵ or lower. Each detected homolog was then assessed for its proximity to a known defense system. For each seed, if the fraction of homologs within 5 kb of 5 genes of a known defense system (‘defense association score’) (Shmakov et al., 2019) was sufficiency high, the seed was retained for further analysis (see Methods). For each retained seed, the gene neighborhoods of 30 representative homologs were examined to identify conserved operons that contain the seed gene and putatively constitute a minimal intact defense system.

[0238] To determine an appropriate cutoff for the defense association score, Applicants performed the same analysis for a selected set of seeds from known systems. From this analysis, a value of 0.15 was chosen because >90% of the known seeds had a score higher than this value (FIG. 8B). Applying this threshold to the novel seeds resulted in a final list of 1.5×10⁴ defense gene candidates (10.5% of all seeds; minimum 50 identified homologs) (FIG. 8C). This analysis suggested that uncharacterized defense systems substantially outnumbered the currently known ones. Furthermore, the defense-enriched seeds included a diversity of identified enzymatic activities, including those that had not been previously implicated in antivirus immunity.

### Candidate Defense Systems Exhibited Antivirus Activity in a Heterologous System

[0239] Applicants selected 50 candidate defense systems to test experimentally by heterologous reconstitution in E. coli. Candidate systems were prioritized for testing based on the following criteria: presence of identified molecular functions not previously implicated in defense; broad phylogenetic distribution; and for multi-gene systems, conservation of component genes. For each system, 1-4 homologs were selected and cloned from the source organism into the low-copy vector pACYC and transformed into E. coli (FIG. 9A). BREX type I (Goldfarb et al., 2015; Gordeeva et al., 2019), Druantia type I (Doron et al., 2018), and the abortive infection reverse transcriptase RT-Abi-P2 (Odegrip et al., 2006) were included as positive controls. Each system was then challenged with a diverse panel of coliphages with dsDNA, ssDNA, or ssRNA genomes, and phage sensitivity was compared to that observed with an empty vector control.

[0240] Applicants observed anti-phage activity in at least one homolog for 29 out of the 50 tested candidates (58%). The most active representative in each of these 29 systems was further tested with an expanded panel of phages in two E. coli strains (FIG. 9B). All 29 systems were active against at least one dsDNA phage; three were active against ssDNA phages (M13 or φX174); and none were active against ssRNA phages (MS2 and Q(3). Phage specificity was typically narrow and varied widely across systems. In addition, the abundance of these systems within sequenced genomes spans two orders of magnitude, ranging from ˜0.1% to ˜10% of the genomes (FIG. 9B and FIG. 14).

RADAR Contained a Divergent Adenosine Deaminase that Edits RNA in Response to Phage Infection

[0241] One of the validated systems was a two-gene cassette consisting of a KAP-family ATPase (˜900 residues) and a divergent adenosine deaminase (˜900 residues); this system was active against dsDNA phages T2, T3, T4, and T5. Applicants focused on this system for further investigation because deaminase activity had not previously been implicated in anti-phage defense. These systems appear in diverse defense contexts, adjacent to CRISPR, BREX, RM, Zorya, and Wadjet, and form three distinct subtypes (FIG. 10A). In some cases, this system had the ATPase and deaminase only, but some variants also included a small membrane protein, either a SLATT domain (Burroughs et al., 2015) or the type VI-B CRISPR ancillary gene csx27 (Makarova et al., 2019). Mutations in either the ATPase Walker B motif or in the putative Zn2+-binding H×H motif of the deaminase abolished defense activity (FIG. 10B).

[0242] Applicants further tested whether it acted on nucleic acids. Indeed, whole-transcriptome deep sequencing showed an enrichment of A to G substitutions in sequencing reads at specific sites in the presence of phage, whereas C, G, or U bases were not affected (FIG. 10C), consistent with base editing of adenosine to inosine. Editing occurred when both the defense system and the phage were present. In this experiment, expression of the defense system without the phage resulted in a near-baseline level of editing, and no editing was detected in the absence of the system. The editing sites were distributed throughout the E. coli transcriptome as well as the phage transcriptome (FIG. 10D). RNA secondary structure analysis indicated a characteristic stem-loop structure at strong editing sites; specific adenosines in loops were edited with up to ˜90% frequency, whereas adenosines within the stem were not edited within the limit of detection.

[0243] Based on these results, Applicants named this system phage restriction by an adenosine deaminase acting on RNA (RADAR). Growth kinetics at varying phage multiplicity of infection (MOI) revealed a threshold MOI above which RADAR-expressing cells had a lower OD600 compared to the empty vector control, suggestive of RADAR-mediated growth arrest (FIG. 10E). Collectively, these results are consistent with an abortive infection mechanism that is activated by phage.

### A Widespread Family of RT-Containing Defense Systems

[0244] The defense systems identified by the pipeline herein included a diverse family of reverse transcriptases (RTs). Although RTs are typical components of diverse mobile retroelements as well as retro-transcribing viruses, some RTs encoded in bacterial genomes show no evidence of mobility (Zimmerly and Wu, 2015). Two of these RTs have been previously shown to play a role in anti-phage defense, namely RT-Cas1, which mediated acquisition of CRISPR spacers from RNA via reverse transcription (Silas et al., 2016), and RT-Abi, a set of abortive infection genes that catalyzed untemplated dNTP polymerization in vitro (Emond et al., 1997; Odegrip et al., 2006; Wang et al., 2011).

[0245] Recent computational analyses have revealed a vast diversity of bacterial RTs, including 16 ‘unknown groups’ (UGs) that either remained functionally uncharacterized, or were identified to perform metabolic roles (Kojima and Kanehisa, 2008; Simon and Zimmerly, 2008; Toro and Nisa-Martinez, 2014; Zimmerly and Wu, 2015). Many of these RTs were independently identified by the computational pipeline herein, suggesting that they might represent a widespread family of uncharacterized defense genes. Applicants found that at least 7 of these RT groups (UG1, UG2, UG3, UG8, UG9, UG15, and UG16) provided robust protection against dsDNA phages (FIG. 9B), and mutations in the (Y/F)×DD (SEQ ID NOS: 1-2) active site of the RTs abolished activity (FIG. 11A-11C). Many of these RTs contained an uncharacterized C-terminal domain, and some were fused to or associated with required enzymatic domains that had not been previously implicated in anti-phage defense, including a nitrilase-family C—N hydrolase and a family A DNA polymerase (FIGS. 11A, B and FIG. 15).

### Retrons Mediated Anti-Phage Defense

[0246] Applicants also identified defense functions for a group of retrons, a distinct class of RTs that produce extrachromosomal satellite DNA (multi-copy single-stranded DNA, msDNA) by reverse transcribing a segment of the 5′ region of its own mRNA (Lampson et al., 2005). Retron cDNA is covalently linked to an internal guanosine of the RNA via a 2′-5′ phosphodiester bond. Retrons had been harnessed for bacterial genome engineering (Farzadfard and Lu, 2014), but their native biological function had remained unknown. Applicants found that the original E. coli retrons Ec67 (Lampson et al., 1989) and Ec86 (Lim and Maas, 1989), as well as the Ec78 retron (Lima and Lim, 1997) and a novel TIR domain-associated retron, mediated defense against dsDNA phages. In addition, the absence of additional domains typical for group II introns in the UG2 group, together with the presence of a large upstream region that formed a identified highly structured RNA, suggested that UG2 was yet another retron-like element. Mutations in the (Y/F)×DD (SEQ ID NOS: 1-2) active site of the RT, as well as a G to A substitution at the branching guanosine, abolished activity, indicating that the defense function depends on msDNA synthesis. Notably, these retrons were associated with other domains, including TOPRIM (topoisomerase-primase) (Aravind et al., 1998) and TIR (Tol/interleukin 1 receptor) domains, that were required for activity (FIG. 11C). The TOPRIM domain can possess nuclease activity (Aravind et al., 1998) whereas the TIR domain can be a NAD+ hydrolase that is involved in programmed cell death pathways in animals and plants (Horsefield et al., 2019).

### Additional Molecular Functions

[0247] Applicants identified other defense systems with diverse molecular functions, including a three-gene cassette containing a von Willebrand factor A (vWA) domain protein, a PP2C-like serine/threonine protein phosphatase, and a serine/threonine protein kinase provided strong protection against T7-like phages (T3, T7, and φV-1). In this experiment, all three genes were required for activity (FIG. 12). This system, termed the TerY-phosphorylation triad (TerY-P), was previously analyzed computationally in the context of Ter-dependent stress response systems (Anantharaman et al., 2012) and can operate as a phosphorylation switch that couples the activities of the kinase and the phosphatase.

[0248] Four systems contained an N-terminal SIR2 (sirtuin) deacetylase domain (FIG. 12), which was present in the Thoeris system (Doron et al., 2018) and had also been detected in the same neighborhoods with prokaryotic Argonaute proteins (Makarova et al., 2009), but had not been functionally characterized in prokaryotes. Additionally, a large 1300 residue P-loop ATPase containing two transmembrane helices inserted into the ATPase domain, similarly to the KAP family ATPases (Aravind et al., 2004), protected against both dsDNA and ssDNA phages.

[0249] Applicants also demonstrated defense function for several identified NTPases of the STAND (signal transduction ATPases with numerous associated domains) superfamily (FIG. 12). This expansive superfamily consists of multidomain proteins that include eukaryotic ATPases and GTPases involved in programmed cell death and various forms of signal transduction (Danot et al., 2009; Leipe et al., 2004). Typically, STAND NTPases contain a C-terminal helical sensor that, upon target recognition, induces oligomerization via ATP or GTP hydrolysis, leading to activation of the N-terminal effector domain. The functions of prokaryotic STAND NTPases remain poorly characterized. Those few for which experimental data are available contain a helix-turn-helix domain and have been shown to regulate transcription (Danot et al., 2009). Several identified STAND NTPases were active against dsDNA phages (FIG. 9B); these proteins contained different putative effector domains, including DUF4297 (a putative PD(D/E)×K-family nuclease that is also present in the Lamassu defense system (Doron et al., 2018)), an Mrr-like nuclease, SIR2, a trypsin-like serine protease, and an uncharacterized helical domain.

[0250] The findings described here substantially expanded the space of protein domains, molecular functions, and their interactions that are employed by bacteria in anti-phage defense. Some of these functions, in particular RNA editing, had not been previously implicated in defense mechanisms. The high success rate of the identification of defense systems based solely on the evolutionary conservation of the proximity to previously identified defense genes validated the defense island concept (Makarova et al., 2013; Makarova et al., 2011) and demonstrated its growing utility at the time of rapid expansion of sequence databases.

[0251] Despite similarities in domain architectures among some of the identified defense systems, their phage specificities differed substantially. The molecular basis of such narrow specificity remained to be uncovered, but these observations emphasized the importance of multiple defense systems for the survival of prokaryotes in the incessant arms race with viruses. Furthermore, these results were compatible with the concept of distributed microbial immunity, according to which defense systems encoded in different genomes collectively protect microbial communities from the diverse viromes they confront. The remarkable variability of the discovered defense systems implied that their sensor and effector components were involved in diverse molecular interactions. Several of the identified defense systems incorporated molecular functions from typically non-defense sources, highlighting the versatility of activities that were recruited for antiviral defense. The notable cases in point include the RNA deaminase activity of the RADAR system, as well as reverse transcriptases of different families, in particular retrons. The demonstration of the defense functions for multiple RTs that were generally associated with mobile genetic elements was consistent with the ‘guns for hire’ paradigm whereby enzymes are shuttled between MGE and defense systems during microbial evolution (Koonin et al., 2019).

[0252] The discovered defense systems can be characterized mechanistically, e.g., by mutating the catalytic residues. Applicants showed here that the respective enzymatic components were functionally important. Many of these systems can function via an abortive infection mechanism, e.g., by causing growth arrest or programmed cell death in the infected hosts as demonstrated here for the RADAR system. In particular, this can be the mode of action of STAND NTPases, homologs of essential eukaryotic programmed cell death effectors, whose role in prokaryotes has long remained enigmatic (Koonin and Aravind, 2002; Leipe et al., 2004). In addition, the membrane-associated ATPase can function analogously to the STAND NTPases to which they are distantly related (Aravind et al., 2004).

[0253] Many of the identified defense systems contained enzymatic activities as well as identified sensor components that had not been previously detected in defense contexts, suggesting the possibility of reengineering for novel biotechnology applications. Further experimental characterization of these systems, as well as others Applicants identified computationally, can be expected to greatly expand the repertoire of such functions.

### Methods

[0254] Detection of known antivirus defense systems. All bacterial and archaeal genomes (n=174,080) were downloaded from Genbank (ftp://ftp.ncbi.nih.gov/genomes/genbank/) in November 2018. For genomes where gene annotations were incomplete or missing, genes were identified using Prodigal (Hyatt et al., 2010). Known defense-related protein domains were annotated using RPSBLAST version 2.8.1 from a set of position-specific scoring matrices curated from the NCBI Conserved Domain Database (CDD) (Doron et al., 2018; Makarova et al., 2011; Marchler-Bauer et al., 2017; Punta et al., 2012). To reduce the false positive rate, a multi-gene system containing a ubiquitous protein domain was required to include two or more of its component genes in close proximity. For example, the type I restriction-modification endonuclease hsdR was called as a defense gene only if the corresponding methylase (hsdM) or specificity protein (hsdS) was also encoded in the vicinity. Toxin-antitoxin systems were excluded from the set of known defense systems due to their overall low enrichment within defense islands.

[0255] Candidate novel defense genes. All translated protein-coding sequences within either 10 kb or 10 genes of known defense systems (whichever was greater), including the components of the known defense systems themselves, were compiled into a preliminary list (n=8.7×10⁶). Highly similar sequences (at least 98% sequence identity and coverage) were discarded using the linclust option in MMseqs2 (Steinegger and Riding, 2017, 2018) with parameters—min-seq-id 0.98-c 0.98, resulting in a reduced list of 2.5×10⁶ sequences. A second round of redundancy elimination was then applied to this reduced list, using the default cluster option in MMSeqs2, yielding a final list of 6.0×10⁵ candidate sequences.

[0256] Scoring candidate genes for defense enrichment. For each of the 6.0×10⁵ candidate genes, a ‘defense enrichment score’ was computed as (number of homologs in proximity to one or more known defense systems)/(total number of homologs). A gene was considered to be located in proximity to a known defense system if it occurred no more than 5 kb or 5 genes away from the locus encoding that system. Candidate sequences with a defense enrichment score of 0.15 or higher were retained for subsequent analysis, with the exception of mobilome components (such as transposons), toxin-antitoxin, or abortive infection components, which were discarded. This cut-off was chosen because more than 90% of the known defense genes scored higher than this value. To identify homologs of the candidate proteins, all 6.2×10⁸ proteins in the original set of Genbank genomes were tabulated, and highly similar proteins (at least 98% sequence identity and coverage) were removed using linclust, resulting in a reduced list of 1.3×10⁸ proteins. Each seed sequence was then searched against this non-redundant protein sequence database using MiMseqs2. To qualify as homologs, matches were required to have a minimum coverage of 70% and a maximum E value of 10⁻⁵ (parameters—coy-mode 0-c 0.7-e 0.00001).

[0257] From genes to defense systems. For each defense-enriched candidate protein, the gene neighborhoods of 30 homologs in proximity to known defense genes were randomly selected and examined on a case by case basis, in order to determine whether the candidate was a stand-alone defense gene system or a member of a conserved multi-gene cassette. Protein domains were identified using HHpred, and the resulting identification were used to infer the involvement of the respective proteins in the activity of the respective identified defense system (Zimmermann et al., 2018).

[0258] Abundance estimation of defense systems. To estimate the abundance of each validated defense system within the microbial pangenome, Applicants downloaded n=205214 genomes available in Genbank as of August 2019. For each defense system, initial protein sequence seeds of the signature genes were taken from experimentally validated loci. Initial seeds were aligned and converted into HMM profiles. Applicants then used a constrained 2 iteration HMM profile search to generate highly specific HMM profiles and retrieve related systems as follows. Each ORF of size 150aa or greater with one or more hits was searched against all HMM profiles using HMMER3.1 and assigned to the profile that had the highest scoring match. For each system, ORFs with profile hits with less than 500 bp of intergenic distance on the same strand were grouped into candidate loci. For multi-protein systems, a putative locus was considered a hit if every signature gene profile for the system had a match in the locus with a bitscore of at least 25. For single gene systems, a locus was considered a hit if the protein had a match to the system's single signature gene profile with a bit score of at least 50 and an alignment coverage of at least 70%. Signature proteins from the identified systems were separately clustered at 50% identity using MMseqs2 and subsequently aligned using MAFFT. The alignments were used to create a new set of signature gene profiles as input to the next iteration. For BREX and Type I RM, Applicants used preexisting pfam profiles for the signature genes in place of iterative HMM profile searching. The final abundance was calculated as the number of system hits divided by the number of genomes (n).

[0259] Bacteria and phage strains. Phages T2, T3, T4, T5, T7, P1, λ, φV-1, M13, φX174, MS2, and Qβ, as well as host E. coli strains K-12 (ATCC25404) and C (ATCC13706), were obtained from the American Type Culture Collection (ATCC). The genome of phage φV-1, originally isolated from a measles vaccine (Milstien et al., 1977; Petricciani et al., 1973), was sequenced and found to be 92% similar to enterobacteria phage 285P, a T7-like phage (Xu et al., 2014).

[0260] Cloning. To facilitate experimental validation using coliphages, the source organism of each candidate defense system was chosen to be as similar as possible to E. coli, in particular, from other strains of E. coli whenever possible. Candidate defense systems were cloned into a variant of the low-copy plasmid pACYC184 containing 7 synonymous mutations in the chloramphenicol resistance gene to remove restriction sites. When possible, genomic DNA from source organisms was obtained from ATCC, NCTC, or DSMZ, and the genes of interest were amplified with Q5 (New England Biolabs) or Phusion Flash (Thermo Scientific) polymerase, using primers with 5′ ends homologous to the ends of the plasmid backbone. Plasmids were assembled using the NEBuilder HiFi DNA Assembly mix (New England Biolabs). When the source organism was not readily available from public culture collections, genes were chemically synthesized (GenScript) with optional human codon optimization of the open reading frames. When possible, the native promoter was retained. For some source organisms outside of Enterobacteriaceae, or when the candidate system was operonized with other upstream genes, the system was placed under a bla or lac promoter.

[0261] Sequence verification of plasmids. The full sequences of all plasmids were verified by high-throughput sequencing. To prepare sequencing libraries, 25-50 ng of each plasmid was mixed with purified Tn5 transposome loaded with Illumina adapters and incubated at 55° C. for 10 min in the presence of 5 mM MgCl2 and 10 mM TAPS buffer (Picelli et al., 2014). The quantity of Tn5 was titrated to generate an average fragment size of ˜100-400 bp. Tagmentation reactions were subsequently treated with 0.5 volumes of 0.1% sodium dodecyl sulfate for 5 min at room temperature and amplified with KAPA HiFi HotStart polymerase using primers containing 8 nt i7 and i5 index barcodes. Barcoded amplicons were sequenced on a MiSeq (Illumina) with at least 150 cycles for the forward read. Reads were aligned to the reference plasmid sequence by the Geneious read mapper, and error-free plasmids were retained for subsequent experiments.

[0262] Competent cell production. E. coli strains K-12 and C were cultured in ZymoBroth with 25 μg/mL chloramphenicol and made competent using Mix & Go buffers (Zymo) according to the manufacturer's recommended protocol.

[0263] Phage plaque assays. E. coli host strains were grown to saturation at 37° C. in Luria Broth (LB). To 10 mL top agar (10 g/L tryptone, 5 g/L yeast extract, 10 g/L NaCl, 7 g/L agar) was added chloramphenicol (final concentration 25 μg/mL) and 526 μL E. coli culture, and the mixture was poured on 10 cm LB-agar plates containing 25 μg/mL chloramphenicol. For phages T2, T4, T5, P1, λ, M13, MS2, and Qβ, dilutions of phage in phosphate buffered saline were spotted on the plates, and plaque counts were recorded after overnight incubation at 37° C. If individual plaques were too small to be counted, the most concentrated dilution at which no plaque formation was visible was recorded as having a single plaque. For phages T3, T7, φV-1, and φX174, a total of 3 μL of phage containing 5×106 virions was spotted, and the area of the plaque was measured after incubation at 37° C. for 68 hr.

[0264] Phage cultivation. Phages T2, T3, T4, T7, φV-1, M13, φX174, MS2, and Qβ were propagated in liquid culture. The host E. coli strain for each phage was grown to an OD600 of 0.2-0.4 at 37° C. in LB and infected with a slab of top agar containing phage plaque from a previous lysis. Cultures were grown overnight at 37° C. with 250 rpm agitation. Phages T5, P1, and λ, were propagated by the double agar overlay method; after overnight incubation at 37° C., plaques were scraped in LB. For both liquid culture and double agar overlay, phage samples were centrifuged to pellet cellular debris, and the supernatant was filtered through with a 0.22 μm sterile filter.

[0265] Whole transcriptome sequencing. E. coli ATCC25404, containing either an empty vector or the candidate defense system, was grown to log phase in LB and diluted to an OD600 of 0.2. The culture was then split into two tubes, one of which was infected with phage T2 at an estimated MOI of 2. Both subcultures were incubated at 37° C. for 1 hr with 250 rpm agitation. RNA was extracted using TRIzol Reagent (Thermo Fisher Scientific) and treated with DNAse I, followed by a RiboMinus ribosomal RNA depletion kit (Thermo). Sequencing libraries were prepared using NEB Ultra II directional RNAseq library prep kit (New England Biolabs) and paired-end sequenced (2×75 cycles) with a NextSeq (Illumina). Adapter sequences were trimmed from sequencing reads using CutAdapt (with parameters—trim-n-q 20-m 20-a AGATCGGAAGAGC-A AGATCGGAAGAGC (SEQ ID NO: 472)), and trimmed reads were aligned to the E. coli MG1655 reference genome using the Geneious read mapper.

[0266] RNA secondary structure. Minimum free energy RNA secondary structures were generated using the Turner (2004) energy parameters at 37° C. (Turner and Mathews, 2010).

[0267] E. coli growth kinetics. Cells were grown to log phase in LB and diluted to an OD600 of 0.2. Cultures were infected with phage T2 at varying MOI at grown at 37° C., and the OD600 was measured every 2 min for a total duration of 4 hr on a Synergy Neo2 plate reader (BioTek).
[0268] Anantharaman, V., Iyer, L. M., and Aravind, L. (2012). Ter-dependent stress response systems: novel pathways related to metal sensing, production of a nucleoside-like metabolite, and DNA-processing. Mol Biosyst 8, 3142-3165.
[0269] Aravind, L., Iyer, L. M., Leipe, D. D., and Koonin, E. V. (2004). A novel family of P-loop NTPases with an unusual phyletic distribution and transmembrane segments inserted within the NTPase domain. Genome Biol 5, R30.
[0270] Aravind, L., Leipe, D. D., and Koonin, E. V. (1998). Toprim—a conserved catalytic domain in type IA and II topoisomerases, DnaG-type primases, OLD family nucleases and RecR proteins. Nucleic Acids Res 26, 4205-4213.
[0271] Burroughs, A. M., Zhang, D., Schïffer, D. E., Iyer, L. M., and Aravind, L. (2015). Comparative genomic analyses reveal a vast, novel network of nucleotide-centric systems in biological conflicts, immunity and signaling. Nucleic Acids Res 43, 10633-10654.
[0272] Cobián Güemes, A. G., Youle, M., Cantú, V. A., Felts, B., Nulton, J., and Rohwer, F. (2016). Viruses as Winners in the Game of Life. Annu Rev Virol 3, 197-214.
[0273] Danot, O., Marquenet, E., Vidal-Ingigliardi, D., and Richet, E. (2009). Wheel of Life, Wheel of Death: A Mechanistic Insight into Signaling by STAND Proteins. Structure 17, 172-182.
[0274] Doron, S., Melamed, S., Ofir, G., Leavitt, A., Lopatina, A., Keren, M., Amitai, G., and Sorek, R. (2018). Systematic discovery of antiphage defense systems in the microbial pangenome. Science 359.
[0275] Emond, E., Holler, B. J., Boucher, I., Vandenbergh, P. A., Vedamuthu, E. R., Kondo, J. K., and Moineau, S. (1997). Phenotypic and genetic characterization of the bacteriophage abortive infection mechanism AbiK from Lactococcus lactis. Appl Environ Microbiol 63, 1274-1283.
[0276] Farzadfard, F., and Lu, T. K. (2014). Synthetic biology. Genomically encoded analog memory with precise in vivo DNA writing in living cell populations. Science 346, 1256272.
[0277] Faure, G., Shmakov, S. A., Yan, W. X., Cheng, D. R., Scott, D. A., Peters, J. E., Makarova, K. S., and Koonin, E. V. (2019). CRISPR-Cas in mobile genetic elements: counter-defence and beyond. Nat Rev Microbiol 17, 513-525.
[0278] Goldfarb, T., Sberro, H., Weinstock, E., Cohen, O., Doron, S., Charpak-Amikam, Y., Afik, S., Ofir, G., and Sorek, R. (2015). BREX is a novel phage resistance system widespread in microbial genomes. EMBO J 34, 169-183.
[0279] Gordeeva, J., Morozova, N., Sierro, N., Isaev, A., Sinkunas, T., Tsvetkova, K., Matlashov, M., Truncaite, L., Morgan, R. D., Ivanov, N. V., et al. (2019). BREX system of Escherichia coli distinguishes self from non-self by methylation of a specific DNA site. Nucleic Acids Res 47, 253-265.
[0280] Hille, F., Richter, H., Wong, S. P., Bratovič, M., Ressel, S., and Charpentier, E. (2018). The Biology of CRISPR-Cas: Backward and Forward. Cell 172, 1239-1259.
[0281] Horsefield, S., Burdett, H., Zhang, X., Manik, M. K., Shi, Y., Chen, J., Qi, T., Gilley, J., Lai, J. S., Rank, M. X., et al. (2019). NAD. Science 365, 793-799.
[0282] Hyatt, D., Chen, G. L., Locascio, P. F., Land, M. L., Larimer, F. W., and Hauser, L. J. (2010). Prodigal: prokaryotic gene recognition and translation initiation site identification. BMC Bioinformatics 11, 119.
[0283] Klompe, S. E., Vo, P. L. H., Halpin-Healy, T. S., and Sternberg, S. H. (2019). Transposon-encoded CRISPR-Cas systems direct RNA-guided DNA integration. Nature 571, 219-225.
[0284] Kojima, K. K., and Kanehisa, M. (2008). Systematic survey for novel types of prokaryotic retroelements based on gene neighborhood and protein architecture. Mol Biol Evol 25, 1395-1404.
[0285] Koonin, E. V., and Aravind, L. (2002). Origin and evolution of eukaryotic apoptosis: the bacterial connection. Cell Death Differ 9, 394-404.
[0286] Koonin, E. V., Makarova, K. S., Wolf, Y. I., and Krupovic, M. (2019). Evolutionary entanglement of mobile genetic elements and host defence systems: guns for hire. Nat Rev Genet.
[0287] Lampson, B. C., Inouye, M., and Inouye, S. (2005). Retrons, msDNA, and the bacterial genome. Cytogenet Genome Res 110, 491-499.
[0288] Lampson, B. C., Sun, J., Hsu, M. Y., Vallejo-Ramirez, J., Inouye, S., and Inouye, M. (1989). Reverse transcriptase in a clinical strain of Escherichia coli: production of branched RNA-linked msDNA. Science 243, 1033-1038.
[0289] Leipe, D. D., Koonin, E. V., and Aravind, L. (2004). STAND, a class of P-loop NTPases including animal and plant regulators of programmed cell death: multiple, complex domain architectures, unusual phyletic patterns, and evolution by horizontal gene transfer. J Mol Biol 343, 1-28.
[0290] Lim, D., and Maas, W. K. (1989). Reverse transcriptase-dependent synthesis of a covalently linked, branched DNA-RNA compound in E. coli B. Cell 56, 891-904.
[0291] Lima, T. M., and Lim, D. (1997). A novel retron that produces RNA-less msDNA in Escherichia coli using reverse transcriptase. Plasmid 38, 25-33.
[0292] Makarova, K. S., Gao, L., Zhang, F., and Koonin, E. V. (2019). Unexpected connections between type VI-B CRISPR-Cas systems, bacterial natural competence, ubiquitin signaling network and DNA modification through a distinct family of membrane proteins. FEMS Microbiol Lett 366.
[0293] Makarova, K. S., Wolf, Y. I., and Koonin, E. V. (2013). Comparative genomics of defense systems in archaea and bacteria. Nucleic Acids Res 41, 4360-4377.
[0294] Makarova, K. S., Wolf, Y. I., Snir, S., and Koonin, E. V. (2011). Defense islands in bacterial and archaeal genomes and prediction of novel defense systems. J Bacteriol 193, 6039-6056.
[0295] Makarova, K. S., Wolf, Y. I., van der Oost, J., and Koonin, E. V. (2009). Prokaryotic homologs of Argonaute proteins are predicted to function as key components of a novel system of defense against mobile genetic elements. Biol Direct 4, 29.
[0296] Marchler-Bauer, A., Bo, Y., Han, L., He, J., Lanczycki, C. J., Lu, S., Chitsaz, F., Derbyshire, M. K., Geer, R. C., Gonzales, N. R., et al. (2017). CDD/SPARCLE: functional classification of proteins via subfamily domain architectures. Nucleic Acids Res 45, D200-D203.
[0297] Milstien, J. B., Walker, J. R., and Petricciani, J. C. (1977). Bacteriophages in live virus vaccines: lack of evidence for effects on the genome of rhesus monkeys. Science 197, 469-470.
[0298] Odegrip, R., Nilsson, A. S., and Haggard-Ljungquist, E. (2006). Identification of a gene encoding a functional reverse transcriptase within a highly variable locus in the P2-like coliphages. J Bacteriol 188, 1643-1647.
[0299] Ofir, G., Melamed, S., Sberro, H., Mukamel, Z., Silverman, S., Yaakov, G., Doron, S., and Sorek, R. (2018). DISARM is a widespread bacterial defence system with broad anti-phage activities. Nat Microbiol 3, 90-98.
[0300] Petricciani, J. C., Chu, F. C., Johnson, J. B., and Meyer, H. M. (1973). Bacteriophages in live virus vaccines. Proc Soc Exp Biol Med 144, 789-792.
[0301] Picelli, S., Björklund, A. K., Reinius, B., Sagasser, S., Winberg, G., and Sandberg, R. (2014). Tn5 transposase and tagmentation procedures for massively scaled sequencing projects. Genome Res 24, 2033-2040.
[0302] Punta, M., Coggill, P. C., Eberhardt, R. Y., Mistry, J., Tate, J., Boursnell, C., Pang, N., Forslund, K., Ceric, G., Clements, J., et al. (2012). The Pfam protein families database. Nucleic Acids Res 40, D290-301.
[0303] Shmakov, S. A., Faure, G., Makarova, K. S., Wolf, Y. I., Severinov, K. V., and Koonin, E. V. (2019). Systematic prediction of functionally linked genes in bacterial and archaeal genomes. Nat Protoc 14, 3013-3031.
[0304] Shmakov, S. A., Makarova, K. S., Wolf, Y. I., Severinov, K. V., and Koonin, E. V. (2018). Systematic prediction of genes functionally linked to CRISPR-Cas systems by gene neighborhood analysis. Proc Natl Acad Sci USA 115, E5307-E5316.
[0305] Silas, S., Mohr, G., Sidote, D. J., Markham, L. M., Sanchez-Amat, A., Bhaya, D., Lambowitz, A. M., and Fire, A. Z. (2016). Direct CRISPR spacer acquisition from RNA by a natural reverse transcriptase-Cas1 fusion protein. Science 351, aad4234.
[0306] Simon, D. M., and Zimmerly, S. (2008). A diversity of uncharacterized reverse transcriptases in bacteria. Nucleic Acids Res 36, 7219-7229.
[0307] Steinegger, M., and Soding, J. (2017). MMseqs2 enables sensitive protein sequence searching for the analysis of massive data sets. Nat Biotechnol 35, 1026-1028.
[0308] Steinegger, M., and Soding, J. (2018). Clustering huge protein sequence sets in linear time. Nat Commun 9, 2542.
[0309] Strecker, J., Ladha, A., Gardner, Z., Schmid-Burgk, J. L., Makarova, K. S., Koonin, E. V., and Zhang, F. (2019). RNA-guided DNA insertion with CRISPR-associated transposases. Science 365, 48-53.
[0310] Suttle, C. A. (2013). Viruses: unlocking the greatest biodiversity on Earth. Genome 56, 542-544.
[0311] Toro, N., and Nisa-Martinez, R. (2014). Comprehensive phylogenetic analysis of bacterial reverse transcriptases. PLoS One 9, e114083.
[0312] Turner, D. H., and Mathews, D. H. (2010). NNDB: the nearest neighbor parameter database for predicting stability of nucleic acid secondary structure. Nucleic Acids Res 38, D280-282.
[0313] Wang, C., Villion, M., Semper, C., Coros, C., Moineau, S., and Zimmerly, S. (2011). A reverse transcriptase-related protein mediates phage resistance and polymerizes untemplated DNA in vitro. Nucleic Acids Res 39, 7620-7629.
[0314] Xu, B., Ma, X., Xiong, H., and Li, Y. (2014). Complete genome sequence of 285P, a novel T7-like polyvalent E. coli bacteriophage. Virus Genes 48, 528-533.
[0315] Zimmerly, S., and Wu, L. (2015). An Unexplored Diversity of Reverse Transcriptases in Bacteria. Microbiol Spectr 3, MDNA3-0058-2014.
[0316] Zimmermann, L., Stephens, A., Nam, S. Z., Rau, D., Kithler, J., Lozajic, M., Gabler, F., Soding, J., Lupas, A. N., and Alva, V. (2018). A Completely Reimplemented MPI Bioinformatics Toolkit with a New HHpred Server at its Core. J Mol Biol 430, 2237-2243.

TABLE 5
Source organism strains of validated defense systems.

| # | System | Genes | Organism | Strain | Promoter |
|---|---|---|---|---|---|
| | BREX type I | 6 | E. coli | DSM5212 | Native |
| | Druantia type I | 5 | E. coli | DSM5212 | Native |
| | RT-Abi-P2 | 1 | E. coli | ECOR30 | Native |
| 1 | RT_retron-TIR | 1 | Shigella | NCTC2966 | Native |
| | | | dysenteriae | | |
| 2 | RT_retron-TOPRIM (Ec67) | 1 | E. coli | NCTC8623 | Native |
| 3 | Nuc_deoxy + RT_retron (Ec86) | 2 | E. coli | BL21 | Native |
| 4 | RT_UG2 | 1 | Salmonella | NCTC8273 | Native |
| | | | enterica | | |
| 5 | RT_UG15 | 1 | E. coli | 21-C8-A | Native |
| 6 | RT_UG16 | 1 | E. coli | KTE25 | Native |
| 7 | RT_UG1-nitrilase | 2 | Klebsiella | NCTC9143 | Native |
| | | | pneumoniae | | |
| 8 | RT_UG3 + RT_UG8 | 2 | E. coli | ECOR12 | Native |
| 9 | ATPase_AAA + Ada | 2 | Citrobacter | ATCC51459 | Native |
| | | | rodentium | | |
| 10 | ATPase_KAP_TM | 1 | E. coli | ECOR25 | Native |
| 11 | ATPase_KAP + QueC + DNase_TatD | 4 | E. coli | NCTC9009 | Native |
| 12 | DUF4011-Helicase_SF1_Dna2- | 1 | E. coli | ATCC43886 | Native |
| | Nuclease_Vsr-DUF3320 | | | | |
| 13 | ATPase_GHKL + Helicase_SF2_HepA | 2 | Vibrio harveyi | ATCC43516 | bla |
| 14 | MBL + Protease_S1-ATPase_STAND | 3 | Erwinia | CFBP5888 | bla |
| | | | piriflorinigrans | | |
| 15 | DUF4297-ATPase_STAND | 2 | Salmonella | NCTC13175 | Native |
| | | | enterica | | |
| 16 | ATPase_STAND | 1 | E. coli | NCTC9087 | Native |
| 17 | Nuclease_Mrr-ATPase_STAND | 1 | E. coli | NCTC11132 | Native |
| 18 | SIR2-ATPase_STAND | 1 | E. coli | NCTC13384 | Native |
| 19 | SIR2-DUF4020 | 1 | E. coli | NCTC9112 | Native |
| 20 | SIR2 | 1 | Cronobacter | NCTC8155 | Native |
| | | | sakazakii | | |
| 21 | SIR2 + Helicase_HerA | 2 | E. coli | NCTC11129 | Native |
| 22 | Nuclease_DUF4297 + Helicase_HerA | 2 | E. coli | NCTC11131 | Native |
| 23 | vWA + phosphatase_PP2C + STK-IB | 3 | E. coli | NCTC9094 | Native |
| 24 | Phosphoesterase_PHP-ATPase_SMC | 1 | E. coli | NCTC8620 | Native |
| 25 | Nuclease_DUF1887 | 1 | Salmonella | NCTC6026 | Native |
| | | | enterica | | |
| 26 | ATPase_AAA + Protease_S8 | 2 | E. coli | ECOR52 | Native |
| 27 | ATPase_DUF499 + DUF3780 + | 4 | E. coli | ECOR58 | Native |
| | Methylase_DUF1156 + Nuclease_PLD- | | | | |
| | Helicase_HepA | | | | |
| 28 | RT_IG9 + DNA Po1A | 2 | Pseodomonas | Wood1 | lac |
| | | | brassicacearum | | Native |
| 29 | RT_retron _ ATPase_AAA + HNH (Ec78) | 3 | E. coli | ECONIH5 | Native |

TABLE 6
PCR primers used to amplify genomic DNA source
organisms containing validated defense systems.

| # | Primer | Sequence |
|---|---|---|
| BREX | Fwd | gctaacttacattaattgcgttgcgcaACAGCACCACGTTCATCTTCC |
| type I | | (SEQ ID NO: 98) |
| | Rev | ccaaggggttatgctagttattgcgGTTCATTAAAATAGTTACTACGTTAATTCACACCC |
| | | (SEQ ID NO: 99) |
| Druantia | Fwd | gctaacttacattaattgcgttgcgcaGGTGAACGTTTGGTTGATAGGG |
| type I | | (SEQ ID NO: 100) |
| | Rev | ccaaggggttatgctagttattgcgCTCAATGGGCATAATTTTACATTGTGC |
| | | (SEQ ID NO: 101) |
| RT-Abi-P2 | Fwd | gctaacttacattaattgcgttgcgcaACATCCCGTCATCATGCCATC |
| | | (SEQ ID NO: 102) |
| | Rev | ccaaggggttatgctagttattgcgCTCCTCGGAATAGAATGTTATGTTCG |
| | | (SEQ ID NO: 103) |
| 1 | Synthesized | |
| 2 | Fwd | gctaacttacattaattgcgttgcgcaCGCGCTATCACGTAAAATAGGC |
| | | (SEQ ID NO: 104) |
| | Rev | ccaaggggttatgctagttattgcgCGAAAAATCAGCCTTAGCGTTCATAAC |
| | | (SEQ ID NO: 105) |
| 3 | Fwd | gctaacttacattaattgcgttgcgcaGCTCATGTTATGCATGTGCATG |
| | | (SEQ ID NO: 106) |
| | Rev | ccaaggggttatgctagttattgcgATTAGGTCTTCGCTTTATTTAAAGGGTTC |
| | | (SEQ ID NO: 107) |
| 4 | Synthesized | |
| 5 | Synthesized | |
| 6 | Synthesized | |
| 7 | Fwd | gagctaacttacattaattgcgttgcgcaGTCCTTAAACACGACAAAACCTGTG |
| | | (SEQ ID NO: 108) |
| | Rev | cccaaggggttatgctagttattgcgCGCAATGTAACACCCACCC |
| | | (SEQ ID NO: 109) |
| 8 | Fwd | gctaacttacattaattgcgttgcgcaTCTCAACTTCCCCAAATGTCCG |
| | | (SEQ ID NO: 110) |
| | Rev | cccaaggggttatgctagttattgcgTTAGCAAAATACGCCCACGAAGTC |
| | | (SEQ ID NO: 111) |
| 9 | Fwd | gctaacttacattaattgcgttgcgcaGAGGATTTATGCACAAAATCCTGATGC |
| | | (SEQ ID NO: 112) |
| | Rev | ccaaggggttatgctagttattgcgGATTTAATCTGTTGTTCCGAACGG |
| | | (SEQ ID NO: 113) |
| 10 | Fwd | gctaacttacattaattgcgttgcgcaACCGTGCTGGCATGTTTTTAC |
| | | (SEQ ID NO: 114) |
| | Rev | ccaaggggttatgctagttattgcgAGGAAGATCCGTGACCAGGAG |
| | | (SEQ ID NO: 115) |
| 11 | Fwd | gctaacttacattaattgcgttgcgcaGAAATTATTTGGAATGGATGATGGCG |
| | | (SEQ ID NO: 116) |
| | Rev | ccaaggggttatgctagttattgcgACTTCTACCTCCCTTTAGAAAAGTTAATG |
| | | (SEQ ID NO: 117) |
| 12 | Fwd | gctaacttacattaattgcgttgcgcaCGGATTGAATCTGTTTATGAAATTTGGCTG |
| | | (SEQ ID NO: 118) |
| | Rev | ccaaggggttatgctagttattgcgCCGACAGTTGTCACTGTTCTTATTACC |
| | | (SEQ ID NO: 119) |
| 13 | Fwd | ccctgataaatgcttcaataatattgaaaaaggaagagtATGGCGGGTGCTTCAATAGAC |
| | | (SEQ ID NO: 120) |
| | Rev | cccaaggggttatgctagttattgcgTTAGTTACTTGCTTTGTAGAATACCGTTAATGG |
| | | (SEQ ID NO: 121) |
| 14 | Rev | cccaaggggdatgctagttattgcgTCAATCCGTAGCCTCTTCATTCTCG |
| | | (SEQ ID NO: 122) |
| | Fwd | ataaatgcttcaataatattgaaaaaggaagagtATGGTAGCGATAAAAATGTATCCGGC |
| | | (SEQ ID NO: 123) |
| 15 | Fwd | gctaacttacattaattgcgttgcgcaACAATTTTTTGCCATAAGACGCTTTC |
| | | (SEQ ID NO: 124) |
| | Rev | ccaaggggdatgctagdattgcgCATTAGGACTAGTAGAAAAGTCTTGGG |
| | | (SEQ ID NO: 125) |
| 16 | Fwd | gctaacttacattaattgcgdgcgcaGGGATTTCCACCACCTCCC |
| | | (SEQ ID NO: 126) |
| | Rev | ccaaggggdatgctagdattgcgTGCATAGCCAATGAAGATAAACGTG |
| | | (SEQ ID NO: 127) |
| 17 | Fwd | gctaacttacattaattgcgdgcgcaGCGCAGCTGACAAAGATTGAC |
| | | (SEQ ID NO: 128) |
| | Rev | ccaaggggdatgctagdattgcgCGATAATAAAAAGGCTCCAATCCCTG |
| | | (SEQ ID NO: 129) |
| 18 | Fwd | gctaacttacattaattgcgdgcgcaACTAGCTAAGCAATAAGGGCG |
| | | (SEQ ID NO: 130) |
| | Rev | ccaaggggdatgctagttattgcgCAATCTCCGAGGTGGCCC |
| | | (SEQ ID NO: 131) |
| 19 | Fwd | gctaacttacattaattgcgdgcgcaTATTTTGCGTAGCTAGAACGCAATC |
| | | (SEQ ID NO: 132) |
| | Rev | ccaaggggdatgctagdattgcgTGGGTATTAGCTCATATCAGAACTAATACCC |
| | | (SEQ ID NO: 133) |
| 20 | Fwd | gctaacttacattaattgcgdgcgcaGTAAGACAAGGGTTGAGCAGGC |
| | | (SEQ ID NO: 134) |
| | Rev | ccaaggggdatgctagdattgcgCAATGGTGGGCTGATTAATTAGATGAG |
| | | (SEQ ID NO: 135) |
| 21 | Fwd | gctaacttacattaattgcgdgcgcaTAGCTATTGTGACTATGCTAACCATATG |
| | | (SEQ ID NO: 136) |
| | Rev | ccaaggggdatgctagdattgcgTTCAGTCTAAATACATACCTGTCGGG |
| | | (SEQ ID NO: 137) |
| 22 | Fwd | gctaacttacattaattgcgdgcgcaGTGCGCCTTATGTGATTACAACG |
| | | (SEQ ID NO: 138) |
| | Rev | ccaaggggdatgctagdattgcgCTCTCAGCCTAATGATTCCAGAATAG |
| | | (SEQ ID NO: 139) |
| 23 | Fwd | gctaacttacattaattgcgdgcgcaCGTGATGAATGAAGCGGCTAAATAC |
| | | (SEQ ID NO: 140) |
| | Rev | ccaaggggdatgctagdattgcgGTAAATCCTCGGGAAAACACAGG |
| | | (SEQ ID NO: 141) |
| 24 | Fwd | gctaacttacattaattgcgdgcgcaGATGGACTGGTACTGTAGATTCACC |
| | | (SEQ ID NO: 142) |
| | Rev | ccaaggggdatgctagdattgcgCAAAGACGCAGAGGCCATCAG |
| | | (SEQ ID NO: 143) |
| 25 | Fwd | gctaacttacattaattgcgdgcgcaGGGCTGTTTGGTTGAATTAAAAATACG |
| | | (SEQ ID NO: 144) |
| | Rev | ccaaggggdatgctagdattgcgCCTTGATTTAAAACTATCAGTAGTAGGAACG |
| | | (SEQ ID NO: 145) |
| 26 | Fwd | gctaacttacattaattgcgdgcgcaATAGAACGATGAAGGATGGAAGCTAC |
| | | (SEQ ID NO: 146) |
| | Rev | ccaaggggdatgctagttattgcgTTGTATTTTGTTGTGTATGGGCGG |
| | | (SEQ ID NO: 147) |
| 27 | Fwd | gctaacttacattaattgcgdgcgcaCGTGATTCAGTTCGCCAGAC |
| | | (SEQ ID NO: 148) |
| | Rev | ccaaggggdatgctagdattgcgCACTCGAAATGGATACCCTGAG |
| | | (SEQ ID NO: 149) |

| | |
|---|---|
| 28 | Synthesized |
| 29 | Synthesized |

TABLE 7
Predicted protein domains within validated defense systems. Transmembrane helices
were identified using TMHMM, and all other domains were identified using HHpred.

| | | | Representative | | | | |
|---|---|---|---|---|---|---|---|
| ID | Gene | Domain | HHpred Hit | Probability | Start | End | Residues |
| BREX | A | DUF1819 | PF08849.11 | 100 | 6 | 189 | 201 |
| type I | B | DUF1788 | PF08747.11 | 100 | 65 | 187 | 200 |
| | C | ATPase | PF07693.14 | 96.66 | 43 | 348 | 1213 |
| | C | DUF499 | PF04465.12 | 99.88 | 247 | 846 | 1213 |
| | D | Methyltransferase | PF02384.16 | 99.7 | 210 | 622 | 1201 |
| | E | PglZ | PF08665.12 | 99.12 | 474 | 650 | 865 |
| | F | Lon protease | PF13337.6 | 100 | 30 | 484 | 694 |
| | F | Lon protease | PF05362.13 | 99.9 | 486 | 693 | 694 |
| Druantia | A | DUF4338 | PF14236.6 | 99.92 | 45 | 339 | 404 |
| type I | B | CoiA | PF06054.11 | 99.77 | 1 | 182 | 548 |
| | C | Macoilin | PF09726.9 | 96.72 | 167 | 323 | 627 |
| | E | Helicase | PF00270.29 | 98.45 | 99 | 388 | 1836 |
| | E | Helicase | 5V9X_A | 97.55 | 1071 | 1208 | 1836 |
| | E | DUF1998 | PF09369.10 | 98.92 | 1626 | 1710 | 1836 |
| RT-Abi-P2 | A | RT | PF00078.27 | 99.09 | 68 | 291 | 515 |
| 1 | A | RT | PF00078.27 | 99.43 | 105 | 309 | 542 |
| | A | TIR | PF13676.6 | 97.91 | 411 | 536 | 542 |
| 2 | A | RT | PF00078.27 | 99.45 | 48 | 262 | 586 |
| | A | TOPRIM | cd01026 | 96.88 | 367 | 465 | 586 |
| 3 | A | Nuc_deoxy | PF15891.5 | 96.04 | 29 | 128 | 307 |
| | B | RT | PF00078.27 | 99.52 | 53 | 248 | 320 |
| 4 | A | RT | PF00078.27 | 99.63 | 54 | 328 | 425 |
| 5 | A | RT | PF00078.27 | 99.12 | 67 | 296 | 540 |
| 6 | A | RT | PF00078.27 | 99.14 | 59 | 263 | 494 |
| 7 | A | RT | PF00078.27 | 99.06 | 80 | 382 | 1232 |
| | A | Nitrilase | PF00795.22 | 98.89 | 953 | 1216 | 1232 |
| | B | Transmembrane | — | — | 4 | 26 | 144 |
| 8 | A | RT | PF00078.27 | 99.39 | 53 | 251 | 398 |
| | B | RT | PF00078.27 | 98.96 | 63 | 323 | 667 |
| 9 | A | ATPase | PF07693.14 | 99.6 | 33 | 364 | 851 |
| | B | Adenosine deaminase | PF00962.22 | 99.52 | 166 | 831 | 856 |
| 10 | A | ATPase | PF07693.14 | 97.62 | 39 | 390 | 1273 |
| | A | Transmembrane | — | — | 160 | 177 | 1273 |
| | A | Transmembrane | — | — | 199 | 218 | 1273 |
| 11 | A | ATPase | PF07693.14 | 99.8 | 15 | 385 | 643 |
| | C | QueC | PF06508.13 | 99.67 | 150 | 369 | 457 |
| | D | TatD DNase | PF01026.21 | 99.94 | 13 | 254 | 263 |
| 12 | A | DUF4011 | PF13195.6 | 99.81 | 33 | 308 | 1911 |
| | A | ATPase | PF13086.6 | 97.93 | 427 | 552 | 1911 |
| | A | Helicase | PF01443.18 | 97.82 | 1379 | 1636 | 1911 |
| | A | Endonuclease | PF18741.1 | 98.7 | 1683 | 1780 | 1911 |
| 13 | A | GHKL ATPase | 5V44_A | 99.46 | 1 | 241 | 2511 |
| | A | GHKL ATPase | 5V44_A | 99.03 | 1544 | 1756 | 2511 |
| | B | Helicase | 6BOG_B | 100 | 1 | 873 | 893 |
| 14 | A | MBL-fold hydrolase | PF00753.27 | 98.79 | 8 | 324 | 386 |
| | B | Protease | PF02122.15 | 98.23 | 2 | 187 | 1935 |
| | B | ATPase | PF14516.6 | 99.36 | 204 | 535 | 1935 |
| 15 | A | DUF4297 | PF14130.6 | 98.41 | 8 | 223 | 2092 |
| | A | ATPase | PF14516.6 | 99.44 | 250 | 597 | 2092 |
| 16 | A | ATPase | PF14516.6 | 98.93 | 316 | 643 | 1484 |
| 17 | A | Mrr | PF13156.6 | 97.05 | 17 | 162 | 1587 |
| | A | ATPase | PF14516.6 | 99.07 | 204 | 476 | 1587 |
| 18 | A | SIR2 | cd00296 | 99.26 | 22 | 244 | 769 |
| | A | ATPase | PF14516.6 | 97.6 | 312 | 464 | 769 |
| 19 | A | SIR2 | cd00296 | 99.44 | 21 | 253 | 1275 |
| | A | DUF4020 | PF13212.6 | 98.39 | 1114 | 1268 | 1275 |
| 20 | A | SIR2 | cd00296 | 99.47 | 21 | 240 | 1207 |
| 21 | A | SIR2 | cd00296 | 99.59 | 26 | 338 | 415 |
| | B | HerA helicase | 4D2I_B | 100 | 10 | 608 | 610 |
| 22 | A | DUF4297 | PF14130.6 | 99.05 | 1 | 191 | 394 |
| | B | HerA helicase | 4D2I_B | 100 | 7 | 568 | 571 |
| 23 | A | VWA | PF00092.28 | 98.93 | 14 | 203 | 277 |
| | B | Phosphatase | PF00481.21 | 99.74 | 5 | 232 | 239 |
| | C | Kinase | PF00069.25 | 100 | 34 | 296 | 561 |
| | C | ssDNA-binding | PF01336.25 | 96.18 | 344 | 435 | 561 |
| 24 | A | PHP | cd07436 | 99.36 | 4 | 238 | 891 |
| | A | ATPase | PF13166.6 | 99.74 | 266 | 836 | 891 |
| 25 | A | DUF1887 | PF09002.11 | 92.5 | 1105 | 1272 | 1272 |
| 26 | A | ATPase | PF13654.6 | 97.36 | 5 | 349 | 384 |
| | B | Protease | PF00082.22 | 99.87 | 264 | 561 | 754 |
| 27 | A | ATPase | PF07693.14 | 96.47 | 49 | 312 | 1022 |
| | A | DUF499 | PF04465.12 | 100 | 79 | 745 | 1022 |
| | B | DUF3780 | PF12635.7 | 100 | 1 | 187 | 195 |
| | C | DUF1156 | PF06634.12 | 99 | 18 | 81 | 945 |
| | C | Methyltransferase | PF01555.18 | 96.08 | 150 | 202 | 945 |
| | C | Methyltransferase | PF01555.18 | 97.76 | 548 | 682 | 945 |
| | D | PLD | cd09179 | 99.17 | 4 | 177 | 907 |
| | D | Helicase | 6BOG_B | 100 | 218 | 865 | 907 |
| 28 | A | RT | PF00078.27 | 99.35 | 136 | 351 | 613 |
| | B | DNA PolA | 2KFZ_A | 100 | 31 | 515 | 515 |
| 29 | A | RT | PF00078.27 | 99.37 | 34 | 241 | 311 |
| | B | ATPase | PF13175.6 | 99.8 | 64 | 432 | 550 |
| | C | HNH | PF01844.23 | 97.57 | 43 | 85 | 216 |

TABLE 8
Amino acid sequences of validated defense systems.

| # | Gene | Sequence |
|---|---|---|
| BREX | A | MIKNDKAWIGLLGGPLMSRESRVIAELLLTDPDEQTWQEQIVGHNILQASSPNTAKRYAATI |
| type I | | RLRLNTLDKSAWTLIAEGSERERQQLLFVALMLHSPVVKDFLAEVVNDLRRQFKEKLPGNSW |
| | | NEFVNSQVRHLPVLASYSDSSIAKMGNNLVKALAEAGYVDTPRRRNLQAVYLLPETQAVLQR |
| | | LGQQDLISILEGKR (SEQ ID NO: 150) |
| | B | MIDPVLEYRLSQIQSRINEDRFLKNNGSGNEIGFWIFDYPAQCELQVREHLKYLLRHLEKDH |
| | | KFACLNVFQIIIDMLNERGLFERVCQQEVKVGTETLKKQLAGPLNQKKIADFIAKKVDLAAQ |
| | | DFVILTGMGNAWPLVRGHELMSALQDVMGFTPLLMFYPGTYSGYNLSPLTDTGSQNYYRAFR |
| | | LVPDTGPAATLNPQ* (SEQ ID NO: 151) |
| | C | MNIEQIFEKPLKRNINGVVKAEQTDDASAYIELDEYVITRELENHRHFFESYVPATGEPRIR |
| | | MENKIGVWVSGFFGSGKSHFIKILSYLLSNRKVTHNGTERNAYSFFEDKIKDALFLADINKA |
| | | VHYPTEVILFNIDSRANVDDKEDAILKVFLKVFNERIGYCADFPHIAHLERELDKRGQYETF |
| | | KAAFADINGSRWEDERDAYYFISDDMAQALSQATQQSLESSRQWVEQLDKNFPLDINNFCQW |
| | | VKEWLDDNGKNILFMVDEVGQFIGKNTQMMLKLQTITENLGVICGGRAWVIVTSQADINAAI |
| | | GGMSSRDGQDFSKIQGRFSTRLQLSSSNTSEVIQKRLLVKTDEAKAALAKVWQEKADILRNQ |
| | | LAFDTTTTTALRPFTSEEEFVDNYPFVPWHYQILQKVFESIRTKGAAGKQLAMGERSQLEAF |
| | | QTAAQQISAQGLDSLVPFWRFYAAIESFLEPAVSRTITQACQNGILDEFDGNLLKTLFLIRY |
| | | VETLKSTLDNLVTLSIDRIDADKVELRRRVEKSLNTLERLMLIARVEDKYVFLTNEEKEIEN |
| | | EIRNVDVDFSAINKKLASIIFDDILKSRKYRYPANKQDFDISRFLNGHPLDGAVLNDLVVKI |
| | | LTPKDPTYSFYNSDATCRPYTSEGDGCILIRLPEEGRTWSDIDLVVQTEKFLKDNAGQRPEQ |
| | | ATLLSEKARENSNREKLLRVQLESLLAEADVWAIGERLPKKSSTPSNIVDEACRYVIENTFG |
| | | KLKMLRPFNGDISREIHALLTVENDTELDLGNLEESNPDAMREVETWISMNIEYNKPVYLRD |
| | | ILNHFARRPYGWPEDEVKLLVARLACKGKFSFSQQNNNVERKQAWELFNNSRRHSELRLHKV |
| | | RRHDEAQVRKAAQTMADIAQQPFNEREEPALVEHIRQVFEEWKQELNVFRAKAEGGNNPGKN |
| | | EIESGLRLLNAILNEKEDFALIEKVSSLKDELLDFSEDREDLVDFYRKQFATWQKLGAALNG |
| | | SFKSNRSALEKDAAAVKALGELESIWQMPEPYKHLNRITPLIEQVQVNHQLVEQHRQHALER |
| | | IDARIEESRQRLLEAHATSELQNSVLLPMQKARKRAEVSQSIPEILAEQQETKALQMDADKK |
| | | INLWIDELRKKQEAQLRAANEAKRAADSEQTYVVVEKTVIQPVPKKTHLVNVASEMRNATGG |
| | | EVLETTEQVEKALDTLRTTLLAVIKAGDRIRLQ* (SEQ ID NO: 152) |
| | D | MNTNNIKKYAPQARNDFRDAVQIKLTTLGIAADKKGNLQIAEAETIGETVRYGQFDYPLSTL |
| | | PRRERLVKRAREQGFEVLVEHCAYTWFNRLCAIRYMELHGYLEHGFRMLSHPETPTAFEVLD |
| | | HVPEVAEALLPENKAQLVEMKLSGNQDEALYRELLLGQCHALHHAMPFLFEAVDDEAELLLP |
| | | DNLTRTDSILRGLVDDIPEEDWEQVEVIGWLYQFYISEKKDAVIGKVVKSEDIPAATQLFTP |
| | | NWIVQYLVQNSVGRQWLQTYPDSPLKDKMEYYIEPAEQTPEVQAQLAAITPASIEPESIKVL |
| | | DPACGSDHILIEAYNVLKNIYEEGYRGRDIPQLILENNIFGLDIDDRAAQLSGFALLMMARQ |
| | | DDRRIFTRDVRLNIVSLQESLHLDIAKLWQQLNFHQQVQTGSMGDMFAENNALTQTDSAEYQ |
| | | LLMRTLKRFVNAKTLGSLIQVPQEEEAELKVFLDALYREQEGDFQQKTAAKAFIPFIQQAWI |
| | | LAQRYDAVVANPPYMGGNYMETELKNFVSSYYPQGKADLYSSFMVRLLLQLKDNRTLSLMTP |
| | | FTWMNLSSFEELRKIILTNFSIQSLVQPEYHSFFESAYVPICAFSISNTPLSWNAKFFDLSD |
| | | FYGEKNQAPNFQYAIKNDNKCHWKYNRITTDFLTPGYIIAYSLPDSALSCFKTSKKLHDVCN |
| | | LKQGLITGDNERYLRFSHESIYNSFSLNEKRKKTKWFPYQKGGAYRKWYGNNDYVVDWENDG |
| | | YSIKNFYNDKGKLRSRPQNIQFYCKEGLTWTSLTISSLSMRYVPNGYIFDAKGPMCPKSSLD |
| | | IWNILGYANSKVIDIFLKQLAPTMDYSQGPVGNVPFKFNDGDLNEIIKELVNIHKRDWDENE |
| | | TSFEFKRDMLVHFSRDINTIKGSFTLRQGENKKAINRTKFLEEMNNSFFINCFNLTDILSPE |
| | | IELNKITLTHATIEIDIQKIISYAIGCQMGRYSLDREGLVYAHEGNNGFADLVAEGAYKSFP |
| | | ADSDGILPLMDEEWFDDDVTSRVKEFIRTVWGEEYLRENLDFIAEVLKPKKGESALEITIRR |
| | | YLSTQFWKDHLKMYKKRPIYWLFSSGKEKAFECLVYLHRYNDATLSRMRTEYVVPLLARYQA |
| | | NIDRLNDQLDEASGGESTRLKRERDSLIKKFSELRSYDDRLRHYADMRISIDLDDGVKVNYG |
| | | KFGDLLADVKAITGNAPEVI* (SEQ ID NO: 153) |
| | E | MQNQDFIAGLKAKFAEHRIVFWHDPDKRFIEELEQLKLESVTLINMTHESQLAVKKRIEIDE |
| | | PEQQFLLWFPHDAPPHEQDWLLDIRLYSSEFHADFAAITLNTLGIPQLGLREHIQRRKAFFS |
| | | TKRTQALKNLATEQEDEASLDKKMIAVIAGAKTAKTEDILFNLITYQYVNQQIEDDSELENT |
| | | QAMLKRHGLDSVLWEMLNHEMGYQAEEPSLENLLLKLFCTDLSAQADPQQRAWLEKNVLLTP |
| | | SGRASALAFMVTWRADRRYKEAYDYCAQQMQAALHPEDHYRLSSPYDLHECETTLSIEQTII |
| | | HALVTQLLEESTTLDREAFKKLLSERQSKYWCQTQPEYYAIYDALRQAERLLNLRNRHIDGF |
| | | HYQDSATFWKAYCEELFRFDQAYRLFNEYALLVHSKGAMILKSLDDYIEALYSNWYLAELSR |
| | | NWNEVLEAENEMQAWQIPGVPRQQNFFNEVVKPQFQNPQIKRVFVIISDALRYEVAEELGNQ |
| | | INTEKRFTAELRSQLGVLPSYTQLGMAALLPHEQLCYQPGNGDIVYADGLSTSGIPNRDTIL |
| | | KNYKGMAIKSKDLLELKNQEGRDLIRDYEVVYIWHNTIDATGDTASTEDKTFEACRTAVAEL |
| | | KDLVTKVINRLHGTRIFVTADHGFLFQQQALSVQDKTTLQIKPENTIKNHKRFIIGHQLPAD |
| | | DFCWKGKVADTAGVSDNSEFLIPKGQIRFFSGGARFVHGGTMLQEVCVPVLQIKALQKTAAE |
| | | KQPQRRPVDIVAYHPMIKLVNNIDKVSLLQTHPVGELYERPRILNIYIVDNANNVVSGKERI |
| | | SFDSDNNTMEKRVREVTLKLIGANFNRRNEYWLILEDAQTETGYQKYPVIIDLAFQDDFF* |
| | | (SEQ ID NO: 154) |
| | F | MQTHHDLPVSGVSAGEIASEGYDLDALLNQHFAGRVVRKDLTKQLKEGANVPVYVLEYLLGM |
| | | YCASDDDDVVEVQGLQNVKRILADNYVRPDEAEKVKSLIRERGSYKIIDKVSVKLNQKKDVY |
| | | EAQLSNLGIKDALVPSQMVKDNEKLLTGGIWCMITVNYFFEEGQKTSPFSLMTLKPIQMPNM |
| | | DMEEVFDARKHFNRDQWIDVLLRSVGMEPANIEQRTKWHLITRMIPFVENNYNVCELGPRGT |
| | | GKSHVYKECSPNSLLVSGGQTTVANLFYNMASRQIGLVGMWDVVAFDEVAGITFKDKDGVQI |
| | | MKDYMASGSFSRGRDSIEGKASMVFVGNINQSVETLVKTSHLLAPFPTAMIDTAFFDRFHAY |
| | | IPGWEIPKMRPEFFTNRYGLITDYLAEYMREMRKRSFSDAIDKFFKLGNNLNQRDVIAVRRT |
| | | VSGLLKLMHPDGAYSKEDVRVCLTYAMEVRRRVKEQLKKLGGLEFFDVNFSYIDNETLEEFF |
| | | VSVPEQGGSELIPAGMPKPGVVHLVTQAESGMTGLYRFETQMTAGNGKHSVSGLGSNTSAKE |
| | | AIRVGFDYFKGNLNRVSAAAKFSDHEYHLHVVELHNTGPSTATSLAALIALCSILLAKPVQE |
| | | MQMVVLGSMTLGGVINPVQDLAASLQLAFDSGAKRVLLPMSSAMDIPTVPAELFTKFQVSFY |
| | | SDPVDAVYKALGVN* (SEQ ID NO: 155) |
| Druantia | A | MHKYPSIIVNINLREAKLKKKVREHLQSLGFTRSDSGALQAPGNTKDVIRALHSSQRAERIF |
| type I | | ANQKFITLRAAKLIKFFASGNEVIPDKISPVLERVKSGTWQGDLFRLAALTWSVPVSSGFGR |
| | | RLRYLVWDESNGKLIGLIAIGDPVFNLAVRDNLIGWDTHARSSRLVNLMDAYVLGALPPYNA |
| | | LLGGKLIACLLRSRDLYDDFAKVYGDTVGVISQKKKQARLLAITTTSSMGRSSVYNRLKLDG |
| | | IQYLKSIGYTGGWGHFHIPDSLFIELRDYLRDMDHAYADHYMFGNGPNWRLRTTKAALNALG |
| | | FRDNLMKHGIQREVFISQLAENATSILQTGKGEPDLTSLLSAKEIAECAMARWMVPRSIRNP |
| | | EYRLWKARDLFDFISNDSLNFPPFDEIAKTVV* (SEQ ID NO: 156) |
| | B | MNYAIDKFTGTLELAARATKYAQYVCPVCKKGVNLRKGKVIPPYFAHLPGHGTSDCENFVPG |
| | | NSIIVETIKTISKRYMDLRLLIPVGSNSREWSLELVLPTCNLCRAKITLDVGGRSQTLDMRS |
| | | MVKSRQIGAELSVKSYRIVSYSGEPDPKFVTEVERECPGLPSEGAAVFTALGRGASKGFPRA |
| | | QELRCTETFAFLWRHPVAPDFPDELEIKSLASKQGWNLALVTIPEVPSVESISWLKSFTYLP |
| | | VVPARTSITAIWPFLNQKTSINHVECVYSDTILLSTNMAPTSSENVGPTMYAQGSSLLLSAV |
| | | GVETSPAFFILNPGENDFVGVSGSIEQDVNLFFSFYKKNVSVPRKYPSIDLVFTKRNKEKTI |
| | | VSLHQRRCIEVMMEARMFGHKLEYMSMPSGVEGVARIQRQTESNVIKLVSNDDIAAHDKSMR |
| | | LLSPVALSQLSDCLANLTCHVEIDFLGLGKIFLPGSSMLSLDDGKFIELSPNLRSRILSFIL |
| | | QMGHTLHGFSLNNDFLLVEKLVDLQPEPHLLPHYRALVKEVKTNGFECNRFR* |
| | | (SEQ ID NO: 157) |
| | C | MSYQYSQEAKERISKLGQSEIVNFINEISPTLRRKAFGCLPKVPGFRAGHPTEIKEKQKRLI |
| | | GYMFQSHPSSEERKAWKSFSLFWQFWAEEKIDKSFSMIDNLGLKENSGSIFIRELAKNFPKV |
| | | ARENIERLFIFSGFADDPDVINAFNLFPPAVVLARDIVIDTLPRILDELEARISLIADNVEK |
| | | KNNHIKELELKIDAFSEQFDNYFNNEKSSLKIINELQSLINSETKQSDIANKAIDELYHFNE |
| | | KNKQLILSLQEKLDFNALAMNDISEHEKLIKSMANDISEFKNALTILCDNKIKNNELDYVNE |
| | | LKKLTERIDTLEINTSQASEVSVTNRFTKFHEIAHYENYEYLSSSEDISNRISLNLQAVGLT |
| | | KNSAEKLARLTLATFVSGQIIQFSGSLADIIADAIAIAGAPRYHIWRVPVGIISDMDAFDFI |
| | | ETIAESSRCLLLKGANLSAFEIYGAAIRDIVVQRQIHPTNYDHLALIATWKQGPATFPDGGM |
| | | LAELGPVIDTDTLKMRGLSATLPQLKPGCLAKDKWTNIDGLHLDSVDDYVDELRALLDEAGF |
| | | DGGTLWKRMIHIFYTSLIRIPNGNYIYDLYSVLSFYTLTWAKIKGGPVQKIEDIANRELKNY |
| | | SAKISS*(SEQ ID NO: 158) |
| | D | MEWRAVSRDKALDMLSTALNCRFDDEGLRISAVSECLRSVLYQYSISETEEARQTVTSLRLT |
| | | SAVRRKLVPLWPDIADIDNAIHPGIMSILNSLAELGDMIKLEGGNWLTAPPHAVRIDNKMAV |
| | | FFGGEPSCTFSTGVVAKSAGRVRLVEEKVCTGSVEIWDANEWIGAPAEGNEEWSSRLLSGTI |
| | | SGFIDAPGNMSETTAYVRGKWLHLSELSFNKKQIYLCRMSVDNHFSYYLGEIEAGRLCRMNS |
| | | LESSDDVRRLRFFLDTKCNCPLKVRIKISNGLARLRLTRRLPRRETKVLLLGWRESGFENEH |
| | | SGITHHVFPEEILPIVRSAFEGLGIIWINEFTRRNEI* (SEQ ID NO: 159) |
| | E | MINKNKVTERSGIHDTVKSLSENLRKYIEAQYHIRDEGLIAERRALLQQNETIAQAPYIEAT |
| | | PIYEPGAPYSELPIPEAASNVLTQLSELGIGLYQRPYKHQSQALESFLGENASDLVIATGTG |
| | | SGKTESFLMPIIGKLAIESSERPKSASLPGCRAILLYPMNALVNDQLARIRRLFGDSEASKI |
| | | LRSGRCAPVRFGAYTGRTPYPGRRSSRRDELFIKPLFDEYNKLANNAPVRAELNRIGRWPSK |
| | | DLDAFYGQSASQAKTVYSGKKTGKQFVLNNWGERLITQPEDRELMTRHEIQNRCPELLITNY |
| | | SMLEYMLMRPEIRNIFEQTKEWLKADEMNELILVLDEAHMYRGAGGAEVALLIRRLCARLDI |
| | | PRERMRCILTSASLGSIEDGERFAQDLTGLSPTSSRKFRIIEGTRESRPESQIVTSKEANAL |
| | | AEFDLNSFQCVAEDLESAYAAIESLAERMGWQKPMIKDHSTLRNWLFDNLTGFGPIEITLIE |
| | | IVSGKAVKLNILSENLFPDSPQQIAERATDALLALGCYAQRADGRVLIPTRMHLFYRGLPGL |
| | | YACIDPDCNQRLGNHSGPTILGRLYTKPLDQCKCASKGRVYELFTHRDCGAAFIRGYVSSEM |
| | | DFWHQPNGPLSEDEDIDLVPIDILVEETPHVHSDYQDRWLHIATGRLSKQCQDEDSGYRKVF |
| | | IPDRVKSGSEITFDECPVCMRKTRSAQNEPSKIMDHVTKGEAPFTTLWTQISHQPASRPIDG |
| | | KHPNGGKKVLIFSDGRQKAARLARDIPRDIELDLFRQSIALACSKLKDINREPKPTSVLYLA |
| | | FLSVLSEHDLLIFDGEDSRKVVMARDEFYRDYNSDLAQAFDDSFSPQESPSRYKIALLKLLC |
| | | SNYYSLSGTTVGFVEPSQLKSKKMWEDVQSKKLNIESKDVHALAVAWIDTLLTEFAFDESID |
| | | STLRIKAAGFYKPTWGSQGRFGKALRKTLIQYPAMGELYVEVLEEIFRTHLTLGKDGVYFLA |
| | | PNALRLKIDLLHVWKQCNDCTALMPFALEHSTCLACGSNSVKTVEPSESSYINARKGFWRSP |
| | | VEEVLVSNSRLLNLSVEEHTAQLSHRDRASVHATTELYELRFQDVLINDNDKPIDVLSCTTT |
| | | MEVGVDIGSLVAVALRNVPPQRENYQQRAGRAGRRGASVSTVVTYSQNGPHDSYYFLNPERI |
| | | VAGSPRTPEVKVNNPKTARRHVHSFLVQTFFHELMEQGIYNPAEKTAILEKALGTTRDFFHG |
| | | AKDTGLNLDSFNNWVKNRILSTNGDLRTSVAAWLPPVLETGGLSASDWFAKVAEEFLNTLHG |
| | | LAEIVPQTAVLVDEENEDDEQTSGGMKFAQEELLEFLFYHGLLPSYAFPTSLCSFLVEKIVK |
| | | NIRGSFEVRTVQQPQQSISQALSEYAPGRLIVIDRKTYRSGGVFSNALKGELNRARKLFNNP |
| | | KKFIHCDKCSFVRDPHNNQNSENTCPICGGILKVEIMIQPEWGPENAKELNEDDREQEITYV |
| | | TAAQYPQPVDPEDFKFNNGGAHIVFTHAIDQKLVTVNRGKNEGESSGFSVCCECGAASVYDS |
| | | YSPAKGAHERPYKYIATKETPRLCSGEYKRVFLGHDFRTDLLLLRITVGSPLVTDTSNAIVL |
| | | RMYEDALYTIAEALRLAASRHKQLDLDPAEFGSGFRILPTIEEDTQALDLFLYDTLSGGAGY |
| | | AEVAAANLDDILTATLALLESCECDTSCTDCLNHFHNQHIQSRLDRKLGASLLRYALYGMVP |
| | | RCASPDIQVEKLSQLRASLELDGFQCIIKGTQEAPMIVSLNDRSIAVGSYPGLIDRPDFQHD |
| | | VYKSKHTNAHIAFNEYLLRSNLPQSHQNIRKMLR* (SEQ ID NO: 160) |
| RT-Abi-P2 | A | MKKVYELTSEEALSYFLRHDSYTTLELPAYINFTTLLNDINSSIHNKKIKIEPTAKELMGKD |
| | | INYEVLVSKDGLYSWRRITLINPLYYVYFCRKITAPATWEIITEKFKSFESNDLFTCSSIPV |
| | | RKDNSSNIAASVMNWWEDFEQKSLALALEYEFWSTDISNFYPSIYTHSFEWVFISKEEAKKK |
| | | KSKNNPGGLIDSHIQMMMNNQTNGIPLGSTLMDTFAELILGQIDIELRKKTNELKIINYKWR |
| | | YRDDYRIFSNSKDDLDIISKCLVNVLGDFGLDLNSKKTELYEDIILHSLKQAKKDYIKEKRH |
| | | KSLQKMLYSIYLFSLKHPNSKTTVRYLNDFLRNLFKRKTIKDNGQQVDAMLGIISSIMAKNP |
| | | TTYPVGTAIFSKLLSFLYGDDTQKKLTKLEQLHKKLDKQPNTEMLDIWFQRTQAKINLEWNK |
| | | SYKSALCVRINDELTKEKTFSVNNLWNIDWIQGKETSPNKAKILSLLRKTKIVDTDKFDKMD |
| | | DNITPEEVNLFFKEHSN* (SEQ ID NO: 161) |
| 1 | A | MSLHDKLLMHNFALANKKSPDFISELPQIEPKPYSNGHKIKWINHTLTSTEVTPPDNLIKIC |
| | | ILIESGEIAITSVSDIANLLGVPAGQLLYILYRKKDNYRTFEIEKKNGKKRVINAPCGGLSI |
| | | LQTRLKPVLEYFYRPKKSAHGFDCGKSIITNAGMHIKKNFWNIDLENYFESISFARVYGIFK |
| | | SKPFNFAHPAATVLAQLCTHNGKLPQGACTSPILAMASASLDKQLTQFAGRKKISYSRYADD |
| | | ITFSFNQRNIDIIKKNDDGSYSLSETIDNIISKNGFKINYDKFRVQTRNTRQSVTGLWNDKV |
| | | NINRRYIRITRSMIHRWTDDKLKYALLFATEKGYQAKDNNHAIQIFRNHIYGRLSFIKMVRG |
| | | KDYPGYLKLMSYMSHNDPLKTQEGLRAMKETENFDVFICHASEDKKDIAIPIYDELTKLKIS |
| | | AFIDHVEIKWGDSLIDKINAALVKSKYVIAILSANSVNKEWPQKELRAVLASEISSGDVKLL |
| | | TLLKKEDEEVVNLSLPLLSDKFYMVYDNNPEVVANNIKSLLQR* (SEQ ID NO: 162) |
| 2 | A | MTKTSKLDALRAATSREDLAKILDVKLVFLTNVLYRIGSDNQYTQFTIPKKGKGVRTISAPT |
| | | DRLKDIQRRICDLLSDCRDEIFAIRKISNNYSFGFERGKSIILNAYKHRGKQIILNIDLKDF |
| | | FESFNFGRVRGYFLSNQDFLLNPVVATTLAKAACYNGTLPQGSPCSPIISNLICNIMDMRLA |
| | | KLAKKYGCTYSRYADDITISTNKNTFPLEMATVQPEGVVLGKVLVKEIENSGFEINDSKTRL |
| | | TYKTSRQEVTGLTVNRIVNIDRCYYKKTRALAHALYRTGEYKVPDENGVLVSGGLDKLEGMF |
| | | GFIDQVDKFNNIKKKLNKQPDRYVLTNATLHGFKLKLNAREKAYSKFIYYKFFHGNTCPTII |
| | | TEGKTDRIYLKAALHSLETSYPELFREKTDSKKKEINLNIFKSNEKTKYFLDLSGGTADLKK |
| | | FVERYKNNYASYYGSVPKQPVIMVLDNDTGPSDLLNFLRNKVKSCPDDVTEMRKMKYIHWYN |
| | | LYIVLTPLSPSGEQTSMEDLFPKDILDIKIDGKKFNKNNDGDSKTEYGKHIFSMRVVVDKKR |
| | | KIDFKAFCCIFDAIKDIKEHYKLMLNS* (SEQ ID NO: 163) |
| 3 | A | MNKKFTDEQQQQLIGHLTKKGFYRGANIKITIFLCGGDVANHQSWRHQLSQFLAKFSDVDIF |
| | | YPEDLFDDLLAGQGQHSLLSLENILAEAVDVIILFPESPGSFTELGAFSNNENLRRKLICIQ |
| | | DAKFKSKRSFINYGPVRLLRKFNSKSVLRCSSNELKEMCDSSIDVARKLRLYKKLMASIKKV |
| | | RKENKVSKDIGNILYAERFLLPCIYLLDSVNYRTLCELAFKAIKQDDVLSKIIVRSVVSRLI |
| | | NERKILQMTDGYQVTALGASYVRSVFDRKTLDRLRLEIMNFENRRKSTFNYDKIPYAHP* |
| | | (SEQ ID NO: 164) |
| | B | MKSAEYLNTFRLRNLGLPVMNNLHDMSKATRISVETLRLLTYTADFRYRIYTVEKKGPEKRM |
| | | RTIYQPSRELKALQGWVLRNILDKLSSSPFSIGFEKHQSILNNATPHIGANFILNIDLEDFF |
| | | PSLTANKVFGVFHSLGYNRLISSVLTKICCYKNLLPQGAPSSPKLANLICSKLDYRIQGYAG |
| | | SRGLIYTRYADDLTLSAQSMKKVVKARDFLFSHPSEGLVINSKKTCISGPRSQRKVTGLVIS |
| | | QEKVGIGREKYKEIRAKIHHIFCGKSSEIEHVRGWLSFILSVDSKSHRRLITYISKLEKKYG |
| | | KNPLNKAKT* (SEQ ID NO: 165) |
| 4 | A | MNNDDYPWFRKRGYLHFDEPVSLKKAVKYVSSPEKIIKHSFLPFLSFEVKSFKIKKDKSTKQ |
| | | LSKTEKLRPIAYSSHLDSHIYAFYAEYLTGHYELLIQENNLHENILAFRSLNKSNIEFAKRA |
| | | FDTITEMGECSAVALDLSGFFDNLDHQILKHQWCKVIGTEALPQDHFAIYKSITRYSKVDKN |
| | | RAYEILGISKNNPKYNRRKICTPVDFRNKIRKNGLITVNNSQKGIPQGSPTSALLSNIYMLD |
| | | FDTEMRDYAQERGGHYYRYCDDMLFIVPTKYNKTLAGDVAQRIKHLKVELNTKKTEIRDFIY |
| | | KDSTLVANMPLQYLGFIFDGSNILLRSSSLARYSERMKRGVRLAKATMDSKNRIRENKGEAL |
| | | KALFKKKLYARYSHIGRRNFLTYGYRAAKIMNSKAIKRQLKPLQKRLENEILK* |
| | | (SEQ ID NO: 166) |
| 5 | A | MVIFDEKRHLYEALLRHNYFPNQKGSISEIPPCFSSRTFTPEIAELISSDTSGRRSLQGYDC |
| | | VEYYATRYNNFPRTLSIIHPKAYSKLAKHIHDNWEEIRFIKENENSMIKPDMHADGRIIIMN |
| | | YEDAETKTIRELNDGFGRRFKVNADISGCFTNIYSHSTPWAVIGVNNAKIALNTKVKNQDKH |
| | | WSDKLDYFQRQAKRNETHGVPIGPATSSIVCEIILSAVDKRLRDDGFLFRRYEDDYTCYCKT |
| | | HDDAKEFLHLLGMELSKYKLSLNLHKTKITNLPGTLNDNWVSLLNVNSPTKKRFTDQDLNKL |
| | | SSSEVINFLDYAVQLNTQVGGGSILKYAISLVINNLDEYTITQVYDYLLNLSWHYPMLIPYL |
| | | GVLIEHVYLDDGDEYKNKFNEILSMCAENKCSDGMAWTLYFCIKNNIDIDDDVIEKIICFGD |
| | | CLSLCLLDSSDIYEEKINNFVSDIIKLDYEYDIDRYWLLFYQRFFKDKAPSPYNDKCFDTMK |
| | | GYGVDFMPDENYKTKAESYCHVVNNPFLEDGDEIVSFNDYMAIA* (SEQ ID NO: 167) |
| 6 | A | MTSTIDFYESDFSATLYPLKTNQILLKHHSQEMSEYIYQKVINPAYPTDSFLSQQKVFSTKP |
| | | KGHLRRTVKLDPVAEYFTYDVTYRNRKIFRPEVSESRKSFGYIFRNGSRIPIHVSYNEYKQS |
| | | LKKYSELYSHSIHFDIASYFNSLYHHDIIHWFSSKEGVSPADVEALGQFFREINSGRSIDFM |
| | | PQGIYPAKMIGNEFLKFVDLHGRLKSAQIVRFMDDFTIFDNDIETLNNDFIRIQQLLGQVSL |
| | | NINPSKTTFDNVMGDVNETLTQIKSSLKEIITEYEHIPTASGVEWETNIEIIKHLDDEQVNK |
| | | LIDLLKDEKIEESDADLILGFLRTHNDSLLSQMPMLLGRFPNLIKHIYTICSGITDKSGLVK |
| | | ILLSYLNTNNNFLEYQLFWIGAIVEDYLLGVGEYGSVLHKLYELSGDFKIARAKVLEIPEQG |
| | | FGFKEIRNEYLRTGQSDWLSWSSAIGTRNLKSAERNYILDYFSKGSPINYLVASCVKKL* |
| | | (SEQ ID NO: 168) |
| 7 | A | MKLLDKKYYNLEPKYEYLKDSFILGLAWKKTDSFVRTHNWYADILELDKCAFDISDEVTNWS |
| | | NEISKNALSKSDIELIPAPKGASWFINQGKWTTNKDNRKIRPLANISIRDQSFATAVTMCLA |
| | | DAIETRQKDCSLSNLGYAEHVKNKVVSYGNRLVCDWDNERARFRWGGSEYYRKFSSDYRSFL |
| | | QRPIYIGRETVNKVSGIDDVYIISLDLKNFFGSIKINLLLEKIKKISADHYAAKFINDNEFW |
| | | TLANRILSWDWPEESLSLLESLDKEKNVGLPQGLASAGALANAYLIEFDESLISKLRTKIED |
| | | SQIILHDYCRYVDDIRLVISGEALESNKIKESIHALVQGILDETLAQNPSDNEPYLKINDSK |
| | | TYILELSDIDNGSGLTNRINEIQHEVGASSIPERNGLDNNIPALQQLLLTEQDNFSEDVDSL |
| | | FPGFKNDKSIKVESVRRFSAHRLEKSLAKKSKLISPEERKQFDNETSLIAKKLLKAWLKDPS |
| | | IMVIFRKAIAINPNLDAYSTILEIIFSRIQRNRDKRDKYIMLYLLSDIFRSVIDVYRNLESE |
| | | YVDDYQKLMGEVTLFAQKILSCKSFIPNYAYQQALFYLAVINKPFIASNKASFDLARLQCVL |
| | | IKQHLEPLNSSDGYLFEVSAQISKDYRANAAFLLSHTNSNKVVDLIIEKFAFRGGEFWNAIW |
| | | KEIVRMQDKDRINEFRWAISKYESKPNSSEHYLSSVISFKENPFRYEHALLKLGVALVELFD |
| | | DTEKNVWQPDGKQYSPHEIKVKLEGNSTSWGELWRPNFSISCSIDKKGEPGKDPRYISPEWL ANYPQTQNDEQKIYWVCSVLRSAALGNVDYTQRNDLKLDKAKYDGIHSQFYKRRMGMLHTPE |
| | | SIVGSYGTITDWFASFLQHGLQWPGFSSSYISQEDILSITNIIEFKNCLLERLGYLNKQICI |
| | | SSNVPTLPTVVNRPELASNHFRIVTVQQLFPKDTNFHPSDVTLANPDVRWKHREHLAEICKL |
| | | TEQTLNAKLKTESREHTSTADLIVFSELAVHPEDEDIVRALAFRTKAIIFSGFVFCEQDGRI |
| | | VNKARWIIPDSSESGTQWRVRDQGKHHMTSDEVALGIQGYRPSQHIISIEGFIPEGPFKLTG |
| | | AICYDATDIKLAADLRDLTDMFVIAAYNKDVDTFDNMASALQWHMYQHIVITNTGEYGGSTM |
| | | QAPYKEKYHKLISHAHGTGQIAISTADIDLAAFRRKLQTYKKTKTQPAGYNRKH* |
| | | (SEQ ID NO: 169) |
| | B | MDTLVKLATIISPLISAGVAIWAILVAKKTISESKEIAKKTIADTAYQAYLQLAMENPQFSK |
| | | GYSADCRQERDPMYDQYVWYVARMIFCFEKIIEVEVNLKDSSWANTLEKHLKFHSEHFKKTN |
| | | VVEEALYIPPILDLIRCAAN* (SEQ ID NO: 170) |
| 8 | A | MLNQSFSVSNLIKLLKKTDPKRYKTGRNSAEYKKYIADKVNGSIETYSFGSISNSRTNNKNV |
| | | YIFKDFMDVLVARKINDNIKRVYSVKQNNRHDIIKKVNTVLSEPVNYYIYRLDIKSFYESID |
| | | KNIVFQRINNNPIISHNTKKFINGLFKHNAFSANNGLPRGMGLSATLSEIFMEEFDAELARL |
| | | PEVFYASRYVDDIIVFSFYKIPDYKNYFSRILPNGLHLNERKCSEYTIEDTSTKHSEIEFLG |
| | | YSFIIHHGLKNQRRHVVIRISEEKIKKIKRRIALAVKDYSMNSDAELLKKRIKYLTGNTLVN |
| | | SNSNKTDALYSGIYYNYQHLTDKTQLKELDIFKNRMLFSSKGEVGRKILAAGHNLLTAPKKY |
| | | SFLAGFEKRLLSSFKREDIIKINKVW* (SEQ ID NO: 171) |
| | B | MKIKISKSDYKRVLLTDILPYEVPILFSNEGFYKLISENKVLPGTFSEGLKLDSYTIPYSYK |
| | | IKKGLASSRSLGIIHPSTQLRICDFYDKYEHLMVHMCTKSPFSLRYPSKIGSYYYEKDFLKS |
| | | RINLKDGLVQFHNHGFDSQETSSSSHFSYKKYPFIYKFYESYEFHRLERKFRKLLKLDIAKC |
| | | FSHIYTHSVSWAVKSKEFSKVNRTYNSFEGCLDKLFQDANYGETNGIIIGPEFSRIFAEIIL |
| | | QRVDLNVESHLNLEPGIVKDKSYATRRYVDDYFIFADDDETFKLTEFVLANELEKYKLYLNE |
| | | SKKEFIERPFVTGATMAKNDIAEIIEDLYGSLIHTEKLDELTAMVNLNPDVKIQPENMNDLF |
| | | PLKGVWNKKLHADKFIKRIKIAVRKNNTTFDLVSSYLLSAIKSKFFKVIRLLRMFDLSGKED |
| | | ITYKFFSIFNEVIFFIYAMDFRVRQTYIISQVILEINSFANKQASDISEVIKKNTFDELLMC |
| | | MKSMGNIHERPVELSNLLICMKGLGEQYKLNPDEFKDLLGISENECFYDLEYFSTCSMLHYI |
| | | GDDVLYLKMKEDIVLAIQSLISGRNDIKKDTETFMLFLDMMTCPYLTVKHKRIIYRTYVEAN |
| | | TGQKRFTNAVIDSEIDSLKNNVIFFNWSGDADLEHVLYKKELRTAYE* |
| | | (SEQ ID NO: 172) |
| 9 | A | MTSEIVLNLDFPEYKDDFCTDSIDEQDNELWQQQANKKLLSFLEVMGEEARRYKENNSRSTH |
| | | PHYKTLSSYHHAIFISGARGAGKTVFMRNARFSWQKHYNKDLKRPKLYFIDVTDPTLLNIDD |
| | | RFSEVIIASIYATVEKRMKQPDIAQNIKDNFINSLKTLSGALGKSKDYDEYRGIDRIQKYRS |
| | | GIHLEKYFHQFLISSVELLDCDALVLPIDDVDMKIDNAFGVLDDIRCLLSCPLVLPLVSGDN |
| | | DLYRFIAKSKFEELLNRKANSNYAKEGSEIAERLSEAYITKVFPSHVKIPLQPIDELLPYLY |
| | | IHSNEDENKQHTSYSEFIKLVQQKFYFLCNGQERSTNWPQPRSAREVTQLIRSLPPSTLSKE |
| | | DDSGTDLWQRFAVWAEERRDGLALTNVESYLFIKNAKAVEDLNLSNLIAFNPLLQKGKYPWA |
| | | EKDFYKQQSQRRKELNAPETNSGILNTVFSEQRKDFILRSMPALELIMEPMYVTKTVAEKND |
| | | NSALIAIYTHSDYYSQQQNRRCHIFFGRAFEIMFWSVLAKTENLPQEFYEKDKFKSLFGNIF |
| | | KKVPFYSIFSMNPTKVVDEENDDGSEPDFSQKLDDSINELVEDIYIWATSNKLRAFKNKNLI |
| | | PLMTCVFNKVFSMNVLRKNVQDRVKFRDEHLSDLAKRFEYMFINAEFTFIREGVVVNTNVAT |
| | | GAAPARVRNLSEFNRYDKTLSRNMSGILSVKEDNGLTIVKESEGDIADLLFEIWHSPLFKLT |
| | | TRTCYPIGKINSQNTAQENLSSDFNSFFENGINFELIKQYYWQTSNHDNIRTADVREWATSR |
| | | LNEAIILFSWMKESKSIKAKIDGQSYEGRLFRGLQQALEGYEEV* (SEQ ID NO: 173) |
| | B | MFNQDPYWLIPTLCLASDRIFYAQLRDHLGQKSSGERKKEKNGYILVQAAQDYQFYFGGRIR |
| | | KEDVQNNALMWQIETGNENCLSMLDSLSAYFLTWRGNCFEVRRERLEPWLMICSVIDPAWII |
| | | AYAYQQLIKQNVVCDSELISLLTEHQCPFAFPKGRGDISFADNHVHLNGHGYSSISMLNFID |
| | | GNYKVKKGIKWPYRQEYTLFESGLLDKNDLPRWLSAYSSCLLKNVYNSFQQGKRSEVDFTCL |
| | | KDAVETVLADEDKYYFLEVASLYDVVTLQQRVLYEAAQQKYHSHQRWLLYTCGIMLGTESED |
| | | YANALANLIRISNILRNYMVVSAVGLGQFIDFFGFNYRRITKPADTNNRVHYDSSAGISREY |
| | | RVSPDFVLGSGVMPDIYARQLFDFYCTQARKGVPEQGHIVVHFTRSFPDKKSTYDKLLTECR |
| | | ERLRSQCDYFGRFLTSLTLQSIEYKNLSTDEDRSIDIRKLVRGYDVAGNENELQIEVFAPVL |
| | | RVLRAAKFKGEGVNFKRLQRPFITVHAGEDYCHILSGLRAMDEAVEFCMLGEGDRIGHGLAL |
| | | GVDIKLWANRQKRAYLTVGQHLDNLVWAYHQAVLLSQHIVEHIPVMHELRDKIHYWSHQLYS |
| | | ETYTPDLLFKAWLLRRNWPDYKSIISDPANINEWVPDQHILVSTDETTAKARKIWERYLNSG |
| | | LAENDVFNRIISVNCAPDTAQNFSMTFNENEDILSKGELLLYEAIQDFLIEKYSRLGLVIEA |
| | | CPTSNIYIGRLEKYHEHPLFRWNPPDSQWIKPGGKFNRFGLRTGPLSVCINTDDSALMPTTI |
| | | ENEHRLMRDCAIHFYGIGTWMADLWINSIRIKGIEIFKGNHLSQDLDNLI* |
| | | (SEQ ID NO: 174) |
| 10 | A | MIMSTPWLTPIVADSDHAEANAVSYEALTPTELDSDKAGCYISALNYAYEHPDIRNIAVTGP |
| | | YGAGKSSVLKTWCKAHNGTLRVLTVSLADFDMQRHVDESNGDSSSDEGTKNTGSVEKSEYSE |
| | | LQQILYKNKKHELPCSRIDRISDVTAGQILRSASFLTGTILLSGAALFFLAPDYVTTKLSLP |
| | | GAFARYLLECPFGVRVSGAVASVMGSLCLLLNQLHRIGIFDRKVSLDKVDLLKGAVTTRASS |
| | | PSLLNVYIDEIVYFFDSTKYDWIFEDLDRFNNGRIFVKLREINQIINNCLSDRKPVKFIYAV |
| | | RDGIFNSAESRTKFFDFVMPVIPVMDNQNAYEHFVKKFKEEEINNNLSECISRIATFIPNMR |
| | | VMHNITNEFRLYQNLVNSRENLAKLLAMIAYKNLCAEDYHGIDSKKGVLYHFIQSYLDHEIQ |
| | | NELLHSANNELEDMAQSLVAITNEKLANRENLREELLMPYLSKNYSGALVFYTEGRQISLDD |
| | | LIQDEDEFLMLLDKENIQVVTPYNRQNFLMINQRDTEKLKQQYEKRCHLIETKSVDNITRVK |
| | | NNISSLESLRTEILSGTVADIAEKMTNEGFVAWIKKKEDTGVLTIQSEHEQIDFIFFLLSSG |
| | | YLSTDYMSYRSIFIPGGLSETDNLFLKDVMSGKGPEKTFSFHLDNVNNIVERLKKLGVLQRD |
| | | NAQHPAVIRWLIDNDPDTLKNNIMALLSQTGSQRVVSLLMLMQNDFTTYVRLRYLEIFMSDE |
| | | HILNRLLAHLCASEERTPEQKFFVQEIAAHLLCLTEKSNIWQSVEINKRIGELIDSSPILIT |
| | | AVPKGYGDAFFEVLKDNTLSVSYIPGDVGDEKCSVIRKTAGAGLFKYSVSNLKNVYLCLTQD |
| | | KNEERMSFSLYPFHCLESLAISELTEILWTNIEDFILSVFIESEEIDRIPELLNSSEVSMTV |
| | | VEQIIAKMDFCINNLDDIINRSECADNNASGRNIYSMLLQHDRIFPSFDNIEHLLHDTSINT |
| | | SGELVQWVNEKHFEFEPSDIVINDTGIFNNFISELICSPVISEEALLKVLSNLNVVIIDVPE |
| | | NIPLRNAELLCSEKKLAPTVNVFTVLFNALSENVDDINRMNTLLGNLIAQRPEIITQEPEDI |
| | | FYIEGDFDEELASELFRHKLIGMNIKVAALRWLRDNKPGILDKSYLLSLDILAELSPWMGDD |
| | | DLRLTLLKRCLVAGDAGKDALCVVLNSFADESYHGLLPHDRFRKIPHSVDLWEVAELISNLG |
| | | FIQPPKMGSGRDEHKIVTTPVRYVRDVEFYD* (SEQ ID NO: 175) |
| 11 | A | MFLNDQETSTDLLYYTAIASTVVRLVDETSDAPITIGVHGDWGAGKSSVLKMLEAACEKKDK |
| | | THCIWFNGWTFEGFEDAKTVIIETIVEDLVASRPMSTKVAEAAKKVLRRIDWLKMAKKAGGL |
| | | AFTAFTGIPTFDQIKGMYELASDFLSAPQDKLSAADFKAFAEKAGGFIKEADTDSNTLPKHI |
| | | HAFREEFRALLDAAEEKLVVIVDDLDRCLPKTAIETLEAIRLFLFVEKTAFVIGADEAMIEY |
| | | AVKDHFPDLPQSTGPVSYARNYLEKLIQVPFRIPALGTAETRIYTTLLLAENALGSEDDNFK |
| | | ALLNKAREEMKRPWISRGLDREAVMAALNGKIPEWENALLFSLHVTPMLSSGTHGNPRQIKR |
| | | FLNSMMLRQAIADERGFGSDIKRPVLAKIMLAERFYPSVYGKLVQLVSNHPEGKPEALAEFE |
| | | ALVRGGKTAPKSRADSKENSSESEDVQNWLKIDWAIGWAKAEPALSGEDLRPYVFVTRDKHS |
| | | TLSNLVVSSHLIPIMEKLLGPKIGMVKIKGDLEKLSPPDADELFEMLSDKLFQEDSFNRKPR |
| | | GFDGLEYLVETQPHLQRRLIDFARRIPVKKAGGWLATRIAQSLVDPTLIEEYTKLIQEWAS |
| | | DENLSLSKSAKATLQLSGYQH* (SEQ ID NO: 176) |
| | B | MGTSKAYGGPVHGLIPDFVENPSPPTLPPVDPADDSTLDTPLIPPDSSGSGPLSTPKANFTR |
| | | YSRSGSRSSLGKAVAGYVRNGVGGAGRASRRMGASRAAAGGLLGLISDYQQGGATQALERFN |
| | | LGNLAGQSASTALLSLVEFLCPPGGSVDEGVARQAMLETIADMSDVGEENFDELTPDQLKEW |
| | | IGFVVHSIEGRLMADIGKNGIKLPDDIDAIVSIQEDLHDFVDGATRTQLREELRNLTGLSGD |
| | | AIDRKVEEIYTVAFELLAREGERLE* (SEQ ID NO: 177) |
| | C | MSHHTLVARLGTDDNSDLQLSRQSTHLTEINFLKENGKLDFGLGQALNGLSDLGLTPMDVSV |
| | | DLALLAATVTAADTRISRGHNAQDLWTREIALYIPVASPTLWNSQTGLLSRMLNFLTGDRWT |
| | | IHFRSRPVIEFIGLIQRSSKERSVNPTSVCLFSGGLDSFIGAIDLLSNGGTPLLISFIYWDT |
| | | TTSVYQQKCAQLLSERYGQSFSHVRARVGFEKTTIEGEDGENTLRGRSFMFFSLATMAADAL |
| | | GGPVTINVPENGLISLNVPLDPLRVGALSTRTTHPFYMARFNELLGNLGISAHLENPYAYKT |
| | | KGEMAIHCHDHAFLRQHAADTMSCSSPQSTRWNPALNEQQSTHCGRCVPCLIRRASLFTAFG |
| | | TDDTIYRIPDLRSRVLDSSKPEGEHVRAFQFALARLARSPSRAKFDIHKPGPLSDYPDCLAE |
| | | YEGVYLRGMKEVERLLSGVITRPLT* (SEQ ID NO: 178) |
| | D | MKLAGQKPAPQWVDFHCHLDLYPNHSALIRECDISRVATLAVTTTPKAWMRNRELTSDSPYV |
| | | RVALGLHPQLIAEREHEIALLEHYLPSARYVGEIGLDASPRFYRSFEAQERIFSRILNACFE |
| | | QGDKELSIHSVRAAAKVLGHLENTRLTENCKAVLHWFTGSISEARRAVELGCYFSINEEMLR |
| | | SPKHRKLVSFLPFERILTETDGPFVFHEEKAIHPRDVQRTVHEIAQIHHVSDTDAAMRILYN |
| | | LRSLVTNSSHSENSS* (SEQ ID NO: 179) |
| 12 | A | MSTVDTSTAEELNQGGSDFILTSLEAMRKKLLDLTSRNRLLNFPITQKGSSLRIVDELPEQL |
| | | YETLCSEIPMEFAPVPDPTRAQLLEHGYLKVGPDGKDIQLRAHPSAKDWAHVLGIRTDFDLP |
| | | DSHKTVVSDSDRELLEKAHQFELQYAQGQNGKLTGIRSEYVNQGIALSALKEACCLAGYEGL |
| | | EDFERQAKAGNEISISSSNPSHDDNRIQALLYPNELEACLRAIYGKAQTALEESGANILYLA |
| | | LGFLEWYESDSSEKARYAPLFTIPVRCERGKLDPKDGLYKFQLYYTGEDILPNLSLKEKLQA |
| | | DFGLALPLFNEEETPESYFASVKKVVEQHKPKWSVKRYGALSLLNFGKMMMYLDLDPARWPC |
| | | DKRNILSHEVIRRFFTSQSCGQENSGLPGGFGQHEYCIDSYPDIHDKVPLIDDADSSQHSAL |
| | | IDAIRGQNLVIEGPPGSGKSQTITNLIAAALLNGKKVLFVAEKMAALEVVKRRLDRAGLGQF |
| | | CLELHSHKTHKRKVLDDINARLVSQATMPTMEEIDAQILRYEDLKQQLNEYAALINNQWAQT |
| | | GKTIHQILSGATRYRHKLDIDATALHIENLSGKQLDKVTQLRLRDQIVEFSRIYKEVREQVG |
| | | ANAEIYEHPWSGVNNTQIQLFDSARTVDLLQTWQTSIIDFQHSYQEYVDKWALEGESLNTLQ |
| | | YIEQLVEDQSNLPVLCGSEHFPALSELDSPDAIARVRHYLDRFELLQGHYVALSQVIEPQKL |
| | | RLLEQGQSCDFPREELEKYGAAEDFTLRDLVRWLESIQSIHDELSSIYAQLNDFKNALPDGI |
| | | ASYIDDSQAGLLFCSELLSILGALPTELIRVRDPLFDDDDIDAVLRDLMCQIETLRPLRDGL |
| | | STLYQLDQLPSQEMLAHAVAVIQQGGLFAWFKSDWRSAKALLMAQSRKPDTKFAELKRCSAD |
| | | LLKYSELLQRFEQSDFGNQLGNAFRGLDTDCEQLMLLRDWYKKVRACYGIGFGKRVAIGSGL |
| | | FNLDGEIIKGVHLIEKSQISSRLMTLVKRVEHEAKLLPRISSLLEEHASWLGEQGVLMQSYR |
| | | QVRNTLIALQGWFINPDISLEQMTHSSEILQNINDLQISLENDSLQLGAFLQLTPACGAYKN |
| | | KQLTLDTINDTLNFAEQLVDKINCVSLATQIRHLASGSDYDLLCRDGGEIVSKWNEQIKNAE |
| | | LYALETKLERSQWLKSTDGSLNTLIERNERAIQQPRWLNGWVNFIRCYEQMHENGLQRIWSA |
| | | VLAGSLPIEKVELGLALAIHDQLAREVIHIHPELMRVSGSQRNALQKSFKEYDKKLIELQRQ |
| | | RIAAKIACRNIPEGNSGGKKSEYTELALIKNELGKKTRHIPIRQLVNRACNALVAIKPCFMM |
| | | GPMSAAHYLEPGRMEFDLVVMDEASQVKPEDALGVIARGKQLVVVGDPKQLPPTSFFDRSAD |
| | | GEDDDDAAALSDTDSILDAALPLFPMRRLRWHYRSRHEKLIAYSNRHFYNSDLVTFPSPNAE |
| | | SPEYGIKFTYVSKGRFSNQHNIEEAQAVAEAVLHHAHHRPGESLGVVAMSSKQRDQIERAID |
| | | ELRRNRPEFNDAIDGLHAMEEPLFVKNLENVQGDERDVIFISFTYGPSEHGGKVYQRFGPIN |
| | | SDVGWRRLNVLFTRSKKRMHVFSSMRSEDVLTSETSKLGVISLKGFLQFAESGKLDSLTTHT |
| | | GRAPDSDFEVAVMEALNHAGFECEPQVGVAGFFIDLAVKDPGCPGRYLMGIECDGAAYHSAK |
| | | SARDRDRLRQEVLERLGWRISRIWSTDWFSNPDEVLSPIIRKLHELKTLAPDVVVPSYEYVE |
| | | TIESSAEVASDSIDSLMPNLGLKEQLKYFATHVIEVELPNVDADRRLLRPAMLEALLEHQPL |
| | | SRSEFVERIPHYLRQATDVYEAQRFLDRVLALIDGAEAEANDAAFESELA* |
| | | (SEQ ID NO: 180) |
| 13 | A | MAGASIDAIGVINQIKDNLTDRYEDGFPVLKEIIQNADDAGANELTIGWSKGFCNAENELLN |
| | | APALFFINDAPLAEEHRDAILSIAQSSKATSKASVGKFGLGMKSLFHMGEAFFFMSDQWRIE |
| | | HWASDVFNPWDKYRDAWNEFGENDKCQIATKLKGFLSTDKPWFVVWVPLRTKALAKAHNNYI |
| | | IINNFSGDEKLPSFFNQAHLSEKTSEILPQLKNLKDIGFFCESDKGVFDEVTSIQLHEDSSR |
| | | SSFCGEPRLNNGDSFAVFSGKIYSNSNEERCALDYAGCERVIFDERLNQLKDENMGWPKSYQ |
| | | FDKKANLPVEALDKAEQHASVTFSRFKTKGQAYLKANWAVFLPLSQTKELVAVPIEGEYDYN |
| | | LYLHGYFFVDAGRKGLHGHDNLGFSTSLEHVKNDEKKLREVWNIILASEGTFNLVLPALNEF |
| | | CQKLRLPHQIKTVLTKALYDLLIERYRKEVSKSANWIINIDDKGAAWSLLDKNAQCLPIPRP |
| | | ENSDYSRIWSTLPGLSKLLDKKSLYEATGNEFLTEQNQRDSWNITLLEEALGSGVVNAFYRS |
| | | INIEYLLQFLQLAKEQCTTEDFDNLIIPQFREVLSTHKLAELSLNKALNTQVFELVSAPKTV |
| | | VLPIDKDDQSIWELVCKIIPAKLLLPKFLSTHNKPIHDNVTEEELFALLTLVDSYIKKQGER |
| | | LSSDESSACERLITFVIDCVNASEYIQKSDFYQKSGHLKLLKVEALGSQQSTKYRSLNELIV |
| | | LKEKYQLFLRGGERNFGKGLGKELVAVVPGLELCFISKDFEIGGLYEGLTACSEAACLRLLS |
| | | TYPNLGSNSARLALTKVFSAELSTDEEKRGFRYLIHGSKEDDLRQTLWKPNRATNPVWMKIW |
| | | RMCQPEDFPGWCELDEEFSNALTNQYEHFIGVKEQFYKDIISEYRTILPECNFDNFDDWEVE |
| | | QLLADIGSQGDERLWKALPVHRTAHNTRVAITTKCLMEGSATVPSEWDVHLIQHSAIAEVAA |
| | | CQHKWVNHGLPKELIEIALTQSSPAQYSAFILDQLCAIRIANEGIEHELEGKINNTKWLRLA |
| | | SGTEVSPEAILSFSANELPESAKFCELKESNIYMFSQLDGNMFEHDQARGFLREWVAKSNSS |
| | | VCSCILAEAAQHQSYVVGNFSNISAQVLEQISCIPPLMQLSAGWGLLVELYQSQYLSVNENK |
| | | QVMLCKETEPQSLWWALERIADDDIFIGQSKELRKAFLEALCNTEGGVDYLPKLRFRNENGS |
| | | YVSGNTLVSNVAQVVADNLISPQEYAVIESYCSKSALTNGNTSKIIELAGDNAPVLSDYFDD |
| | | WEGMVPPDAIATFIALFAKSGGVEKLVNNYLRQSTLESIKQGYEEKWNSGKGRRGEFSHYPY |
| | | SSLYKSVDFELAICAENAAYMTSIFGERIQVKLQKTPDSLLVHQANKSKTKRIELRRVDTKN |
| | | VSKDQLLRMLAKAVETIFTDVFGAECIRFESEFLKRFGASEQVDIQITRQIVLENVVPLLER |
| | | LQVREEGLCDLRSDYKREQRVLASSDPSVLQDRSRLNSVLTKIKETLENNEKVQSLVLESVR |
| | | KEMSKHFQYSPFSVPFELFQNADDALCELIEMQGDSTNVLTRFDVVSGSDGTLNFYHWGREV |
| | | NYCKSSYVAGKNQFDRDLEKMVSLNVSDKSDGKTGKFGLGFKSSLLLTDIPRLVSGDICAEI |
| | | HAGVLPSVPSKPVMTELNQNVDEYKIGNRKPTLIQLPKCDKKRADLKLVLGRFKSNAGILTV |
| | | FSRQIREINIDEQRFGWSGQALHNIPEVLVGEVKLPTNTSEESNVILRSNRVLIINTESGQF |
| | | LFALDSNGVVSLSNRKNLSSFWVLNPIDEDLKLGFCINAPFAVDIGRSQLAVDNGDNIDLSS |
| | | SLGKALSAVLVKMFAASSNNWNEFAEEVGLGQSSTFIKFWASLWDVITAHWPARLGETNSKA |
| | | ELKQMFTVEDGLLAFYQRCAALPRNLGVKEDSLVQLKNVDTGANKPLTKAFNTLGNHPILQR |
| | | LYKDQQLVGHDTFEFLKSIDFRPNNGALTKLELIDLIGQDFPHNEVNHDRASFYGRLFGKNF |
| | | EKLMSNFEMTVTEKKVLEERFSELKFLNKTGVYVTASKLIVEGSPERDLLSKFAPDSAKLSE |
| | | KYDQASMDLVSFIRRDVSYDIHSWAKQIRSEESNRGGKQEGLCSFLVEGGYLASSLLRKLQT |
| | | DHPAFLTKGRFDPSVLTEKWRWSSSKASAFISIWIDTEEDKARFIVRQAQKEFIPNVTNGEQ |
| | | ILENITNWWNQCRNQSLIDYDKQLYAQPMPWKAMTEDFELETLEVKKGWLKLFYLGSCQTLG |
| | | FNNDVANRNVVSWFEDKGWWDKLAVANGPSPEVWKELMEEYLQTARVDERYRVWIQVLPLYR |
| | | FATKLKDYVALFMNASFIDNLDDLLKPNSSNKLSGSGIQVSELKGTLGIGINFILRELQRHQ |
| | | VLEREYCEDIQKYAFVLPARLRKLLKKMGAGLSFDAEPENSERAYDYFVSALNSETHPLLKD |
| | | FDIPFRVLLADKQAFERCFNFALDEQFEEVYG* (SEQ ID NO: 181) |
| | B | MDNIIRVIHPKFGVGTVEFEKAETSLVRFEHGFEECLKSELEAVADLKSDLVSGQSVAASEL |
| | | ALKTLAHSLKSVNENWSVFSKSNINLLPHQLWVCHRVLRQWPTNQLIADDVGLGKTIEAGLI |
| | | LWPLIERKRVKRLLILTPAPLVEQWHQRMLDMFDIRLSMYAPENDTSRVNYWDSNNMVVASL |
| | | PTLRNDKNGRLERMLNAEPWDMLIVDEAHHLNSTEDKGGTLGFRFIQTLIENDKFESKLFFT |
| | | ATPHRGKEHGFFSLLQLLRPDLFNVKQMDEREMRPFVKDVLIRNNKQFVTDMNGERLFKPLS |
| | | VSSRTYSYSEQEQFIFYDLLTKFIVSGQAYASSLNSRDQRAVMLVLTAMQKLASSSIAAIER |
| | | ALKGRIEKHKLGKQRLQDIEVQQAALLEKREESESQSESEIYSDELAQLELEFIETTTRVQL |
| | | MDDELPRIMELLSACQKVGSETRILTILDILETEFKDRTVVFFTEYKATQALLMGALNKKYG |
| | | EGCVTFINGENRLLNVENGSGVCVDYVTDRYNAAKRFNEGKVRFIISTEAGGEGIDLQQNCF |
| | | SMIHVDLPWNPMRLHQRVGRLNRYGQVKNVEVITLRNPDTVESRIWDLLNTKIDLIMRSVGG |
| | | AMDEPENLMELILGMADSTLFNELFTEAANRKNSESLSAWFDHKTKTFGGESWQKVKDLIGR |
| | | AEKFDYQDLEAVPRLDLGDLKPFFTQMLSFNQRRCKYDENGGLSFLTPHAWLGQFGTRRSYE |
| | | KLHFDRKAKQLDSEADIIGFGHPMFSKAVNQGEQIPGSYAFLNGIEKDLVVFKVQDQVTGTD |
| | | ASVKVSIVGLVLDDNGDCELVKDEDLIGYLNEYLKISNDVDSKRTPEDLVSVIQTANDYLME |
| | | NVSSIGLPFRLPNSEPLTVFYKASN* (SEQ ID NO: 182) |
| 14 | A | MVAIKMYPAKDGDAFLIICDEEKSAFLIDGGYAETFRQHILPDLRELSFNGYRLRLVMATHI |
| | | DSDHIGGLVDFFLVNGHAAEPAVITVDRVWHNSLRAMTRPENNAQKVDSREITDFLRRRYHV |
| | | EADKAKPHEISARQGSSLAASLLAGDYHWNEGKGYQCICTGTSIPNLMCDNSLTILSPSKER |
| | | ISALCLWWRRQLASLGFSGRSSSSEAFDDAFEFFCKREASQVPLPHVINARTPLLERDYARD |
| | | TSPTNGSSIAFSLVLNKKRILMLGDAWAEEWTSLGASGASHHFDIIKISHHGSIRNTSPNLL |
| | | KIIDAPVYLISTDGKKHARHPNLAVLKAIVDRPAAFTRTLYFNYANSASAFMKNYLSASGAQ |
| | | FRIIEGSTDWITL* (SEQ ID NO: 183) |
| | B | MRYAATETEIRNATVLIECAGYTGSGTLIAADKVLTAAHCVVSDDPETPITVTFFGADEDVC |
| | | VNATISEIDTSCDACLLTLSDSVDIPPITLMTQPEREGSQWKAFGYPASRNGPSHYLHGTIS |
| | | QILPRLFHGVDMDLSVSADCVLEEYSGVSGAAILSENKCIAMVRIRMDGGLGAVSLDKLSGL |
| | | LIRNGLIPDDIASLPDSSLSGEVVLNRTEFRDNFESFVLEHKGRAVLLEGSPGSGKTTFCRH |
| | | YQPRSEQLAVAGVYEFTPEDGAGTTFKILPEVFADWLHNQVSILLSGRPARREETEKINLTQ |
| | | KVSDLLHTFSDYWKHKGKYGVIFIDAVNEASECGDEAVSRFTALLPVTLPENVKLVFTAPSL |
| | | SSAGKAFRHWLTPQDCISLTLLSHREVLQLTARELKTSAPSLSLLTRVSDIAQGHPLYLRYI |
| | | LGYLKANPDQVNLEIFPVFSGSIETYYERLWQGLVKDESAVNLLGILSRMRWGIDISSLIPV |
| | | LTPQEQTVFVPTLDRIQHLLLNDKSSALCHQSFAAFINSKTAVINSLLHGRLADFCLTSGES |
| | | YGLINRAYHLLLASHDRHPEAALVCTQEWADACIVKGAQPDELIHDIRQTLKNTLIRADAVA |
| | | SIRLLLLFQRMTFRHHFLFLQSAYHSGLALAALGRPDEALEQLIPSGSLVVDAVDAIVSAQT |
| | | LARMGNSEHALKLLEKVKSAVDQEFERNPVNLSDFIGLSLAWVRAELMAGVVDGHGRTREVV |
| | | EYLYGCGQVVRDNFEQSAHSKSAYTRAFYPLQAEMEAVNIAFNDRSVSLRTVKEKFGSLPEN |
| | | ILDLMLSSVMRAHDIILQHQLPMPQHALQPVWYNLDRLLHTDIPYSNEIRFNSLSSLIFFNA |
| | | PSALIIRMAGSFEVVPEITLLNEENEIAADSIDVSEQGQLWLVSAYLNETQPCPDIKHPSQG |
| | | CSEWLKTLTEAIFWYSGQARRAVIDGNDEKKELLLVKVQNDILPALSYSLEERMAWPNSWAM |
| | | PEQIIPMIYEELVNMFGACWPDKISVTTDFILAHTPQQCGLYSEGYTIRLLNRVIQTLLNEH |
| | | RFLGQSDTTFQLLETLFIAFVSAFTENRQELVPELLNIIPAYISLDAPQLAQDTYTELLGVS |
| | | MGPDWYKEDQFALMTTMLRVIPQHTDTNTTLSQVAGFLEHASGEMTFRRYVRQEKSQFIGEL |
| | | IRRGNYAHGFNYYRQQSCGSHEEMLTQLSHPAADSPHPLKGMRFPGGALDEEHAVECIVSEL |
| | | RNRVDWRLRWGLLEIFSFGSIGNLAVPFAELINEFSADTEDLNEIPKRLHNILHGDVPFSEH |
| | | RNFIKNFTEHLADNHKPLFAEFISLLSEDTSDNDVKPPPSGDANQKGTDTSDDVAMQPGLFG |
| | | KRSAINRAEACMENARKAAARRNTVRASELAVESLHIIQDGDWSVWRKNNHLAELTRTYILD |
| | | NSADAGSVIRAYASLVEKERYAPAWVIASHLTEIAASKFSDQEAQAINQIVLEHNRHMLGNT |
| | | EADAAHFSFLNEPDTSDAGEETLYFLFWLLEHPLKFRRERALEVLKWLASDDDKILGQCVTE |
| | | ALVSDIASRAEALMALTDWVSARSPQRIWDFIVKERSLFEWLEGTTALSQVHLLERVTSRAG |
| | | FVLRNEIAAFERPRKLLLTSEASGQRNIPENLPTWVQSLSQTLAVMEKQGIDIPALLTLLEK |
| | | RVLQQSGLADITVAFELEBCLLARGFTVNRTPSHHRWETMVRFALNQIIHEAAAQDELQNIE |
| | | PLLRAWNPASEECVEPWEVCNRAKQIICAVMEGRHQQASGIEDGFFLHYLDEVEVSREGQTH |
| | | LVEISAVLTTAHNGHESLRPGAESEFNATQTPDERTLSVHLTCQRVKMQPLLFGGATPAAVS |
| | | KKFMQMTGTLPSDFIRRQWRSGRSLSKNRWGEPISRGSLLLMKRTTTLPPGLGLAWYVTVDG |
| | | KLMNIFSYAPRRR* (SEQ ID NO: 184) |
| | C | MKYSMETPKTREEFEARCFHLLNAIKLGRYHGIPGEGNKEQVPFLPNGRVDLANIDTMTRLS |
| | | MNSLYDFHYNRDNYPQFDLSENDENEEATD* (SEQ ID NO: 185) |
| 15 | A | MSDSLLVRTSRDGDQFHYLWAARRALRLLEPQSTLVALTIEGASTTEMGSQPWEDGEELTDI |
| | | AEYYGSNELATATTVRYMQLKHSTMHSDTPFPPSGLQKTIEGFATRYKALIQKIPVETLRTK |
| | | LEFWFVTNRPVSSSFSEAINDAANQHVTRHPHDLAKLEKFTGLQGAELSIFCQLLHIEGQQD |
| | | DLWSQRNILLRESAGYLPDLDTEAPLKLKELVNRKALTESAANPSITRMDVLRALGVDETDL |
| | | FPAPCRIERIENSVSRTQEATLVQRVVEAFGAPVIIHADAGVGKSIFSTHIEEHLPTGSVSI |
| | | LYDCFGLGQYRNASSYRHHHRTALVQMANEMASRGLCHPLIPNAGTGISQYMRAFLHRLSQS |
| | | ISILRASEPLAVLCIIIDAADNAQMAAEEIGETRSFIKDLIREKLPDGVCLVALCRPYRREL |
| | | LDPPPEALTLSLQTFNRDETAAHLHQKFPDASESDVDEFHRLSSCNPRVQALSLSQNLPLND |
| | | TLRLLGPNPKTVEDTIGEVLEKSIARLRDTAGISERAQIDTICSALAILRPLIPLSVLSAIS |
| | | GVAGSAIKSFALDLGRPLIVSGETIQFFDEPAETWFQRRFRPSAADLHQFITKLRPLTKDSS |
| | | YAASVLPALMLEGNQLSELIELAISSQALPETSAVERRDIELQRLQFALKAALRTGRYQDAA |
| | | KLALKAGGECAGDNRQRVLLRDNIDLAAKFVGSNGVQELVSRNAFPDTGWPGSRNAYYAAIL |
| | | SEYPELSGEARSRLRLTMEWLTNWSQLPDDERSRQNVTDQDRAVMLIACLNIHGAEAAAREL |
| | | RRWRPRKLSFDAGKIVAMQLLAHARYDELDQLAIAAGNDISLVMGIVLEARKLHRPVAEQAI |
| | | RRTWRLLKSQRVSIKDRNHANNQTIAAITGMVEMALIQSVCTESESIQLLDRYLPKVPPYAL |
| | | TSEYSKERVAYVRAYALQANLMGSQLALSDLASTEVKKELMAEKRHGESDDLRQLKQYSGVL |
| | | IPWYNLWAKVILGKTRKADLESELSDTQKESTAIKGHSYSEHSLSSNEIANVWFDILEAGNV |
| | | SKDDVENIIKWSQHKGNRVFTPTLHRFSSVCAEISGLGELSYHFAELALSLWRDEHSDAQIK |
| | | ADGYIDLSRSLISLDEPEAKEYFNQAIEVTNKLGDENLSRWEAILDLAEYVAGKTQVPPETS |
| | | YKLARCAELTREYVDRDKHFAWSDTVEILAELCPSSALAIISRWRDRTFGNHRSILAWTIEH |
| | | LVKKNKINALDALPLITFENDWHKCDLLDSVLSSCTDDKDKIMAFEVVYHYTKFNVQNIQNL |
| | | KKLDAISTSLGIEHTELKERISGLQHTETVSKKSSLSSNDNEQGHDQEWESIFKDCDLSSID |
| | | GISAAYEKFRNVPEFYSKETFIKKAISRVKTGKECSFITAIGAIFHWGLYDFKYILESIPDE |
| | | WTSRLSIKTTLAGLIKEYCQRFCMRIRKSRVYEIFPFSLASRLSGISEKEIFGITLEAIAES |
| | | PEPANSDRLFSLPGLLVSKLESNEALDVLSYALDLFDEVLKDEDGDGPWNEKLSPPTHVEDS |
| | | LAGYIWARLGSPEAEMRWQAAHAVLALCRMSRTCVIQGIFQHAINATTLPFCDRNLPFYTLH |
| | | AQLWLMIAAARVALDDGKSLIPNIGYFYHYATTDQPHVLIRHFAARTLLALHDSDLISIPAQ |
| | | EENKLRNINQSTTLPVLDKVEDHRGEDSYTFGIDFGPYWLKPLGRCFGVSQKQLEPEMLRII |
| | | RDVLGFKGSRNWDEDERNKRRYYQDRDNHHSHGSYPRVDDYHFYLSYHAMFMTAGQLLATKP |
| | | LVGSDYDDVEDVFQDWLRRHDISRNDHRWLADRRDIPPKERSSWLNSSSDNRDEWLASISEN |
| | | VFNETLCPSPGLLTLWGRWSDVCSDRKESIIVHSALVSPERSLSLLRALQTTKNVYDYKIPD |
| | | AGDNLEIDHAHYQLKGWIKDIAEYCGEDEFDPWAGNVRFPIPEPASFIIDAMKLTTDKDHRW |
| | | VTSPSDVEPAMISSIWGHLSGKNDEEKSHGYRLCASIHFIKSALETFNMDLILEVDVDRYSR |
| | | NSRYERNNENELDNIPSSTRLFLFRHDGTIHTLYGNYRNGEKTS* (SEQ ID NO: 186) |
| | B | MAHHIAELIYDAEHCTDDIVRTAKQAEIRDSIWSFWSNRYELPIGSRPFQELEPILRTLKGL |
| | | DPENEQPRFFSPYRDLINVEKETSEVQKWLTAAKDIDSAAKILIDYCLSLAAENAIDKSQEW |
| | | VELAQKAGLNKDVDLLEIRIFQLRGTPANTDNPNNAQRRILEKRQKRLEAFLLLGSQLNEQL |
| | | KSQLEALPAIEDEPTDDDEDF* (SEQ ID NO: 187) |
| 16 | A | MEPISITVATYVATKLIDQFISQEGYGCIKKALFPQKRYVDRLYQLIEETAIEFEETYPVES |
| | | GAIPFYHSEPLFEMLNEHIFFKEFPDKEILLDKFKEYPSITPPTQQQLSLFYEMLSLKINNC |
| | | SKLKKLHIEETYKEKIFDINEELIQVKLILRSIDEKLTFHLSDDWLNEKNSQAIADLGGRYT |
| | | PELNVKLEIAEIFDGLGRTNDFSKIFYSHIDSFLVAGKKLHSCDVISSELFEINQSLKEISD |
| | | IYQEINFSKLDEIPINKFNNYVSSCQTAIGGAVSILWELREKSEQVGETKHYSDKYSSTLRM |
| | | LREFDYACNELRIFINSTTVKLANNPFLLLEGKAGIGKSHLLADVIKNRIASGYPSLLILGQ |
| | | QLTSDESPWSQIFKRLQLKITSREFLEKLNLYGKKTGKRVLVFIDAINEGNGNKFWNDNINS |
| | | FVDEIRCFEWLGLIMSVRTTYRNVTISHENVVRNNFEIHEHIGFQNVELEAVSLFYDYYNIE |
| | | RPSSPNLNPEFKNPLFLKLLCEGIKKNGLTKVPVGFNGISNIFNFLVEGVNKSLASPKKYAF |
| | | DPSFPLVKDALNEIIKFKLEIGRNSISLKDAHSVVQSVVNDYVADKTFLSALIDEGLLTKGI |
| | | VRNDDNSTEEVVYVAFERFDDHLTVNFLLNDVENIESEFKPDGRLKKYFHDECDFYIKSGIV |
| | | EALSIQLPERYEKELYEFLPEFSNNLKLLEAFIDSLIWRDIKAIDFEKIRPFINEHVFKFKD |
| | | SFDHFLEAVISISGLVGHPFNANFLHDWLKDYSLANRDSFWTTELKYKYSEDSAFRHLIDWA |
| | | WARTDKSFVSDESIELVATSLCWFLTSSNRELRDCSTKALVSLLEPRIPVLRKIIDKFYGVN |
| | | DPYVWERIFAVALGCTLRTDNIKELKYLAETVYQKVFCSKYVYPNILLRDYAREIIEFANHL |
| | | GLELESIELSKTRPPYNSIWPDKIPSKEELESLYDKEPYRELWSSIMEDGDFSRYTIGTNYN |
| | | HSDWSGCKFNETPVDRKQWKTFKCKLTDQQKDLYDATDPFIYDDKCEGIKFGRVVGRKAQEE |
| | | IKASKKLFKNSLSYDLLSEFENEIEPYLDHNNNLLETDKHFDLRLAQQFIFNRVIELGWDPE |
| | | KHGNFDQQIGTGRGRREAFQERIGKKYQWIAYYEYMARLADNFTRFEGYGDERKENPYQGPW |
| | | EPYVRDIDPTILLKETGTKPGSNKEMWWLNDEVFDWTCSNEDWVKSSTTITNSYAFIEVKDD |
| | | NGDEWIVLESHPSWKEPKIIGNDDWGHPRKEVWYQIRSYIVKVEEFENFRCWAIAQDFMGRW |
| | | MPECTDRYQLFNREYYWSEAFKSFKSDYYGGSDWTSVTDRESGAKIADVSVTSINYLWEEEF |
| | | DKSKIETLNFLKPSNLIFEKMGLKSGEVEGSFNDENGTMVCFAAEAVYASKPHLLVKKEPFL |
| | | TMLRDNGFEIVWTLLGEKGVIGGSLISSHHYGRQEFSGAFYYEDSQLTGSHKTSFTR* |
| | | (SEQ ID NO: 188) |
| 17 | A | MVKPNWDNFKAKFSENPQGNFEWFCYLLFCQEFKMPAGIFRYKNQSGIETNPITKDNEIIGW |
| | | QSKFYDTKLSDNKADLIEMIEKSKKAYPGLSKIIFYTNQEWGQGRKSHEPEGDKNADNYLET |
| | | VGNSNDPKIKIEVDQKAYESGIEIVWRVASFFESPFVIVENEKIAKHFFSLNESIFDLLEEK |
| | | RKHTENVLYEIQTNIEFKDRSIEIDRRHCIELLHENLVQKKIVIVSGEGGVGKTAVIKKIYE |
| | | AEKQYTPFYVFKASEFKKDSINELFGAHGLDDFSNAHQDELRKVIVVDSAEKLLELTNIDPF |
| | | KEFLTVLIKDKWQVVFTTRNNYLADLNYAFIDIYKITPGNLVIKNLERGELIELSDNNGFSL |
| | | PQDVRLLELIKNPFYLSEYLRFYTGESIDYVSFKEKLWNKIIVKNKPSREQCFLATAFQRAS |
| | | EGQFFVSPACDTGILDELVKDGIVGYEAAGYFITHDIYEEWALEKKISVDYIRKANNNEFFE |
| | | KIGESLPVRRSFRNWISERLLLDDQSIKPFIAEIVCGEGISNFWKDELWVAVLLSDNSSIFF |
| | | NYFKRYLLSSDQNLLKRLTFLLRLACKDVDYDLLKQLGVSNSDLLSIKYVLTKPKGTGWQSV |
| | | IQFIYENLDEIGIRNINFILPVIQEWNQRNKVGETTRLSSLIALKYYQWTIDEDVYLSGRDN |
| | | EKNILHTILHGAAMIKPEMEEVLVKVLKNRWKEHGTPYFDLMTLILTDLDSYPVWASLPEYV |
| | | LQLADLFWYRPLKETGERYFISMDIEDEFGLFRSHHDYYPESPYQTPIYWLLQSQFKKTIDF |
| | | ILDFTNKTTICFAHSHFAKNEEEVDVFIEEGKFIKQYICNRLWCSYRGTQVSTYLLSSIHMA |
| | | LEKFFLENFKNADSKVLESWLLFLLRNTKSASISAVVTSIVLAFPEKTFNVAKVLFQTKDFF |
| | | RFDMNRMVLDRTHKSSLISLRDGFGGTDYRNSLHEEDRIKACDDVHRNTYLENLALHYQIFR |
| | | SENVTEKDAIERQQVLWDIFDKYYNQLPDEAQETEADKTWRLCLARMDRRKMKITTKEKDEG |
| | | IEISFNPEIDPKLKQYSEEAIKKNSEHMKYVTLKLWASYKREKDERYKNYGMYEDNPQIALQ |
| | | ETKEIIKKLNEEGGEDFRLLNGNIPADVCSVLLLDYFNQLNNEEREYCKDIVLAYSKLPLKE |
| | | GYNYQVQDGTTSAISALPVIYHNYPMERETIKTILLLTLFNDHSIGMAGGRYSVFPSMVIHK |
| | | LWLDYFDDMQSLLFGFLILKPKYVILSRKIIHESYRQVDYDIKKININKVFLNNYKHCISNV |
| | | IDNKISIDDLGSMDKVLHILNTAFQLIPVDTVNIEHKKLVSLIVKRFSTSLLSSVREDRVDY |
| | | ALRQSFLERFAYFILHAPVSDIPDYIKPFLDGFNGSEPISELFKKFILVEDRLNTYAKFWKV |
| | | WDLFFDKVVTLCKDGDRYWYVDKIIKSYLFAESPWKENSNGWHTFKDSNSQFFCDVSRTMGH |
| | | CPSTLYSLAKSLNNIASCYLQGITWLSEILSVNKKLWEKKLENDTVYYLECLVRRYINNERE |
| | | RIRRTKQLKQEVLVILDFLVEKGSVVGYMSRENIL* (SEQ ID NO: 189) |
| 18 | A | MQVQHHTEPNLKNEIVALFKASQLIPFFGSGFTRDIRAKNGKVPDAIKFTELIRNLAAEKEG |
| | | LTQTEIDEILRISQLKKAFGLLNMEEYTPKRKSKALLGNIFSECKLSDHEKTKIINLDWPHI |
| | | FTFNIDDAIENVNRKYKELHPNRAVQREFISANKCLFKIHGDITEFIKYEDQNLIFTWREYA |
| | | HSIEENKSMLSFLSEEAKNSAFLFIGCSLDGELDLMHLSRSTPFKKSIYLKKGYLNLEEKIA |
| | | LSEYGIEKVITFDTYDQIYQWLNNTLQNVERKSPTRSFELDDSKLMKEEAINLFANGGPVTK |
| | | IVDNKRILRNSITFSQRDVCDDAIKALRNHDYILITGRRFSGKSVLLFQIIEAKKEYNASYY |
| | | SSTDTFDPSIKNSLIKFENHIFVFDSNFFNAQSIDEILTTRVHPSNKVVLCSSFGDAELYRF |
| | | KLKDKKILHTEIQIKNNLINEEGNYLNDKLSFEGLPLYKSSETLLNFAYRYYSEYKNRLSGS |
| | | NLFNKQFDEDSMFVLILIAAFNKATYGHINSHNKYFDIQNFISQNDRLFELESTNTDPSGVI |
| | | ICNSPSWLLRVISEYIDKNPASYKTVSDLIISLASKGFLAASRNLISFDKLNELGNGKNVHK |
| | | FIRGIYKEIAHTYREDMHYWLQRAKSELISAHTIDDLVEGMSYASKVRLDSAEFKNQTYYSA |
| | | TLVLAQLSARALSINNDKIYALSFFESSLESIRNYNNNSRHINKMMDKNDGGFRYAIQYLKD |
| | | NPLIELLPRKDEVNELINFYESRKK* (SEQ ID NO: 190) |
| 19 | A | MQFITNGPDIPDELLQAHEEGRVVFFCGAGISYPAGLPGFKGLVELIYQRNGTTLSEIEREV |
| | | FERGQFDGTLDLLERRLPGQRIAVRRALEKALKPKLRRRGAIDTQAALLRLARSREGALRLV |
| | | TTNFDRLFHVAAKRTGQAFQAYVAPMLPIPKNSRWDGLVYLHGLLPEKADDTALNRLVVTSG |
| | | DFGLAYLTERWAARFVSELFRNYVVCFVGYSINDPVLRYMMDALAADRRLGEVTPQVWALGE |
| | | CEPGQEHRKAIEWEAKGVTPILYTVPAGSTDHSVLHQTLHAWADTYRDGIQGKKAIWKHALA |
| | | RPQDSTRQDDFVGRMLWALSDKSGLPAKRFAELNPAPPLDWLLKAFSDERFKYSDLPRFCVS |
| | | PHVEIDPKLRFSLVQRPAPYELAPQMSLVSGCVSASKWDDVMSHIARWLVRYLGDPRLIIWI |
| | | AERGGQIHDRWMFLIESELDRLAALMRERKTSELDEILLHSPLAIPGPPMSTLWRLLLSGRV |
| | | KSPLQNLDLYRWQNRLKNEGLTTTLRLELRGLLSPKVMLRRPFRYSEDDSSSTDEPLRIKQL |
| | | VDWELVLTADYVRSTLFDLADESWKSSLPYLLEDFQQLLRDALDLLRELGESDDRHDRSHWD |
| | | LPSITPHWQNRGFRDWVSLIELLRDSWLAVRAKDSDQASRIAQNWFELPYPTFKRLALFAAS |
| | | QDNCIPPERWVNWLLEDGSWWLWATDTRREVFRLFVLQGRHLTGIAQERLETAILAGPPREM |
| | | YEDNLEADRWHYLVAHSVWLCLAKLRGAGLVLGESAATRLTEISTAYPKWQLATNERDEFSF |
| | | IWMSGTGDPGFEESIDVDIAPRKWQELVQWLAKPMPERLPFYEDTWSDVCRTRFFHSLYALR |
| | | KLSQDDVWPVGRWREALQTWAEPGMILRSWRYAAPLVLDMPDAVLQEISHAVTWWMEEASKT |
| | | ILCHEETLLALCRRVLMIETSPESSTIRNGIETYDPVSTAINHPIGHVTQSLITLWFKQNPN |
| | | DNDLLPVELKTLFTKLCNVQIELFRHGRVLLGSRLIAFFRVDRPWTEQYLLPLFAWSNPVEA |
| | | KAVWEGFLWSPRLYEPLLIAFKSDFLESANHYSDLGEHRQQFAIFLTYAALGPTEGYTVEEF |
| | | RTAISALPQEGLEVAAQALYQALEGAGDQREEYWKNRVQPFWQQVWPKSRNLATPRISESLT |
| | | RMVIAARGEFPAALAVVQDWLQPLEHLSYDVRLLLESDICSRYPADALSLLNAVTAEQHWGP |
| | | RELGQCLLQIVQAAPQLEQDVRYQRLNEYSRRRSV* (SEQ ID NO: 191) |
| 20 | A | MTNKNKIKPLLNNISARLWDGRAAILIGAGFSRNAKPLTSKARKFPMWNDLGDIFYESVYCK |
| | | KNDNRYSNVLKLGDEVQAAFGRATLDKLIMDHVPDKEYEPSKLHVSLLSLPWIDVFTTNYDT |
| | | LLERASVNVDSRKYDIVLNKNDLMNAERPRIIKLHGSFPSERPFIVTEEDYRKYPLENSPFV |
| | | NTVQQSLIENTLCLIGFSGDDPNFLNWIGWIRDNLGTENSPKIYLIGLFSFNEAQRKLLEKR |
| | | NISIVDLSFLGDFGKDHYLAHQRFIQFLYESKNRDNLIEWPIETNYDRIVFNDGIELKTEKI |
| | | KKCILEWAQSRQSYPNWLILPESNRSNLWQNTIDWLSVANYDVAWDGSDDLDFGYEITWRLN |
| | | KALLPIFNDTSEFLFKLIEKYEINYVSGINNKIIDFDEKYSHITLSLMRFCRQENLIDKWKN |
| | | LNDLLIQNLDRLTPEVKSDYYYENILFSYFNLNFDEARNKLSNWETNKLLPHHEIKRAGLLA |
| | | EFGMLDEAINLLEETLSTIRRNSLLSSRNIDYSSESQEAYGIYILRMFKRSLRLDSKDDDYS |
| | | SEYNSRLATLSQYRSDPENEIKYLEIKLESLPGTFKNTNDTDFDLNKRTVTTYLGGSPTEVR |
| | | SLDAFSFFLLAEELGLPFHIPGMNIFSGIVENAARHIYQYSPEWAIFSIFRTFNKDKAKSLF |
| | | NRNRISSLERKKVEDLFDGYYKKYEQIITKKIEDRLNDKLEIEISTLSIIPEILSRLVTKVS |
| | | FNKKKDIIHLLLKLFNSDNFHQYMETKDLLKRTTSNLSDLQKISLIDEFIDFPSAPPNTQLH |
| | | MGQRYNFLTPFECLLGVTITPPKENSKKIASAKLKKDINDLKSDNLDLRKAVSQKLITLYNL |
| | | EMLNKSDTTKLIKNLWSKRDNFGFPIGSGYYKFFFINNLNPDNENIADKFISIIKTYKFPVQ |
| | | EGKRVSITGGLDEYCTELNGALHHISLPEKTLSEIISKIHDWYVKDRAWLEKRDDLAKEFTL |
| | | RFRNITNIITTILEHHKDKLHAESINEISSLLDKMKEDKIPVNSAVTMLCLKNKSTYLERKD |
| | | IENGLYSFNKDDVIEAINSTYVFIRNNEFPLTIIQAISDKIAWDRNPRLPDCYNLIAYIINS |
| | | CEFTLPDYLIEKILRGLAYQINIDDRDFVDNNEYLNHLEKKLSATKLAASMFRKNETLGIDQ |
| | | PSIIQEWKNMCNSRNEFDEIRNEWNNNI* (SEQ ID NO: 192) |
| 21 | A | MSIYQGGNKLNEDDFRSHVYSLCQLDNVGVLLGAGASVGCGGKTMKDVWKSFKQNYPELLGA |
| | | LIDKYLLVSQIDSDNNLVNVELLIDEATKFLSVAKTRRCEDEEEEFRKILSSLYKEVTKAAL |
| | | LTGEQFREKNQGKKDAFKYHKELISKLISNRQPGQSAPAIFTTNYDLALEWAAEDLGIQLFN |
| | | GFSGLHTRQFYPQNFDLAFRNVNAKGEARFGHYHAYLYKLHGSLTWYQNDSLTVNEVSASQY |
| | | DEYINDIINKDDFYRGQHLIYPGANKYSHTIGFVYGEMFRRFGEFISKPQTALFINGFGFGD |
| | | YHINRIILGALLNPSFHVVIYYPELKEAITKVSKGGGSEAEKAIVTLKNMAFNQVTVVGGGS |
| | | KAYFNSFVEHLPYPVLFPRDNIVDELVEAIANLSKGEGNVPF* (SEQ ID NO: 193) |
| | B | MSLFKLTEISAIGYWGLEGERIRINLHEGLQGRLASHRKGVSSVTQPGDLIGFDAGNILVVA |
| | | RVTDMAFVEADKAHKANVGTSDLADIPLRQIIAYAIGFVKRELNGYVFISEDWRLPALGSSA |
| | | VPLTSDFLNIIYSIDKEELPKAVELGVDSRTKTVKIFASVDKLLSRHLAVLGSTGYGKSNFN |
| | | ALLTRKVSEKYPNSRIVIFDINGEYAQAFTGIPNVKHTILGESPNVDSLEKKQQKGELYSEE |
| | | YYCYKKIPYQALGFAGLKLLRPSDKTQLPALRNALSAINRTHFKSRNIYLEKDDGETFLLYD |
| | | DCRDTNQSKLAEWLDLLRRRRLKRTNVWPPFKSLATLVAEFGCVAADRSNGSKRDAFGFSNV |
| | | LPLVKIIQQLAEDIRFKSIVNLNGGGELADGGTHWDKAMSDEVDYFFGKEKGQENDWNVHIV |
| | | NMKNLAQDHAPMLLSALLEMFAEILFRRGQERSYPTVLLLEEAHHYLRDPYAEIDSQIKAYE |
| | | RLAKEGRKFKCSLIVSTQRPSELSPTVLAMCSNWFSLRLTNERDLQALRYAMESGNEQILKQ |
| | | ISGLPRGDAVAFGSAFNLPVRISINQARPGPKSSDAVFSEEWANCTELRC* |
| | | (SEQ ID NO: 194) |
| 22 | A | MDRSAVDTIRGYCYQVDKTIIEIFSLPQMDDSIDIECIEDVDVYNDGHLTAIQCKYYESTDY |
| | | NHSVISKPIRLMLSHFKDNKEKGANYYLYGHYKSGQEKLTLPLKVDFFKSNFLTYTEKKIKH |
| | | EYHIENGLTEEDLQAFLDRLVININAKSFDDQKKETIQIIKNHFQCEDYEAEHYLYSNAFRK |
| | | TYDISCNKKDRRIKKSDFVESINKSKVLFNIWFYQYEGRKEYLRKLKESFIRRSVNTSPYAR |
| | | FFILEFQDKTDIKTVKDCIYKIQSNWSNLSKRTDRPYSPFLLFFIGTSDANLYELKNQLFNE |
| | | DLIFTDGYPFKGSVFTPKMLIEGFSNKEIHFQFINDIDDFNETLNSINIRKEVYQFYTENCL |
| | | DIPSQLPQVNIQVKDFADIKEIV* (SEQ ID NO: 195) |
| | B | MSRNNDINAEVVSVSPNKLKISVDDLEEFKIAEEKLGVGSYLRVSDNQDVALLAIIDNFSIE |
| | | VKESQKQKYMIEASPIGLVKNGKFYRGGDSLALPPKKVEPAKLDEIISIYSDSIDINDRFTF |
| | | SSLSLNTKVSVPVNGNRFFNKHIAIVGSTGSGKSHTVAKILQKAVDEKQEGYKGLNNSHIII |
| | | FDIHSEYENAFPNSNVLNVDTLTLPYWLLNGDELEELFLDTEANDHNQRNVFRQAITLNKKI |
| | | HFQGDPATKEIISFHSPYYFDINEVINYINNRNNERKNKDNEHIWSDEEGNFKFDNENAHRL |
| | | FKENVTPDGSSAGALNGKLLNFVDRLQSKIFDKRLDFILGEGSKSVTFKETLETLISYGKDK |
| | | SNITILDVSGVPFEVLSICVSLISRLIFEFGYHSKKIKRKSNENQDIPILIVYEEAHKYAPK |
| | | SDLSKYRTSKEAIERIAKEGRKYGVTLLLASQRPSEISETIFSQCNTFISMRLTNPDDQNYV |
| | | KRLLPDTVGDITNLLPSLKEGEALIMGDSISIPSIVKIEKCTIPPSSIDIKYLDEWRKEWVD |
| | | SEFDKIIEQWSKS* (SEQ ID NO: 196) |
| 23 | A | MAYEAQISRTNPAAFLFVVDQSGSMSDKMSSGRSKAEFVADALNRTLMNLITRCTKSEGVRD |
| | | YFEIGVLGYGGQGVSNGFSGSLGGQVLNPISALEQNPARVEDRKRKMDDGAGGIIETAIKFP |
| | | VWFDPIASGGTPMREALTRAAEELVTWCDAHPDCYPPTILHVTDGESNDGDPEEIANHLRQI |
| | | RTNDGEVLILNIHVSSLGNDPIRFPSSDTGLPDAYAKLLFRMSSPLPEHLVRFAQEKGHTVG |
| | | IESRGFMFNAEAAELVDFFDIGTRASQLR* (SEQ ID NO: 197) |
| | B | MKLEFLGTVPKDPEYPKANEDKFAFSEDGRRLALCDGASESFNSKLWADLLARKFTADPKVN |
| | | PEWVASALAEYSATHDFRSMSWSQQAAFERGSFATLIGVEEFEEHQAVEILAIGDSITMLVD |
| | | CGKLICAWPFDNPEKFNERPTLLATLYAHNNFVGGSTFWTRHGKTFYLEKLTQPKLLCMTDA |
| | | LGEWALKQALAEDSGFIELLSLQTEEELAELVLRERAAKRMHIDDSTLLVLSF* |
| | | (SEQ ID NO: 198) |
| | C | MPYPSLEQYNQAFQLHSKLLIDPELKSGTVATTGLGLPLAISGGFALTYTIKSGAKKYAVRC |
| | | FHRESKALERRYEAISRKISSLRSPYFLDFQFQPQGVKVEGISYPIVKMAWAKGETLGEFLE |
| | | VNRRSAQAIAKLSASIESLAAYLEKEKIAHGDFQTGNLMVSDGGATVQLIDYDGMFVDEIKT |
| | | LGSSELGHVNFQHPRRKATNPFNHTLDRFSLISLWLALKALQIDPSIWDKSNSELDAIEFRA |
| | | NDFVDPGSSSILGMLSGIQQLSTHVKNFAAVCASAMEKTPSLGDFIASKNIPISLASISMNG |
| | | DIPVSRLKPGYIGAYTVLSALDYSACLQRVGDKVEVIGKIIDVKLNKTRNGKPYIFVNFGDW |
| | | RGNIFKISIWSEGISALPSKPDASWIGKWISVIGLMEPPYVSGKYKYSHISITVTTIGQMTV |
| | | LSEPDARWRLAGPNESRQTLTSTSSNQEALERIKSKSTTSTPMPMNTNATTANQAILNKLRA |
| | | STQTVAAARAQTQHWPNKSSTHYVAPTGTSASQPVQNIPSPASTSKQQTSQKNIVTKILKWL |
| | | FG* (SEQ ID NO: 199) |
| 24 | A | MVGSRWYKFDFHNHTPASHDYKIPDISPREWLLAYMKQHVDCVVTSDHNSGAWVDVLKGELE |
| | | NMSRDASTGDLPEFRPLTLFPGVELTATGNVHILAVLHTHSTSADVERLLAQCNNNSPIPSE |
| | | VPNHQLVLQLGPAGIISNIRRNPKAVCILAHIDAAKGVLSLTNQAELTAAFQESPHAVEIRH |
| | | RVEDITDGTRRRLIDNLPWLRGSDAHHPEQAGVRTCWLKMSSPDFDGLRHALLDPENCVLFD |
| | | QLPPEEPASYLRSLKFRTRHCHPVGQDSASVEFSPFYNAVIGSRGSGKSTLIESIRLAMRKT |
| | | EGLTATQGSKLDQFIRTGMEADSFIECIFHKEGTDFRLSWRPDSKHELHIFSDGEWMPDSHW |
| | | SADRFPLSIYSQKMLYELASDTGAFLRVCDESPVVNKRAWKERWDQLEREYLNEQITLRGLR |
| | | ARQGSADSLRGELSDAERAVSQLQSSAYYPVCRQLALARNELSAATLPLEHFERRIAAIQAL |
| | | AEEPLQRSDIPPEPSGLLMAFMARLSSVQQQYDQRLNTLLAEYAAELAGIRREQSFIALRTA |
| | | VSDQETNVESEAVSLRARGLNPDVLNELMARCESLKNELRNYDGLDGAISASVARSEQLLAE |
| | | MRAHRMALTDNRKAFLSSLSLSALEIKILPLCAPYEDVISGYQTVTGISNFAERIYDNSDGS |
| | | GLLSDFISERPFSPLPAATEKKYRALDELKALHHSIRLDNSEAGAGLHGSFRNRLRSLNDQQ |
| | | LDALQCWYPDDGIHIRYQTPGGQMEDIAFASPGQKGASMLQFLLSYGTDPLLLDQPEDDLDC |
| | | LMLSMSVIPAIMSNKKRRQLIIVSHSAPIVVNGDAEYVISMQHDRTGLYPGLCGALQEAPMK |
| | | ALICRQMEGGEKAFRSRYERILS* (SEQ ID NO: 200) |
| 25 | A | MNEHLSHMDVHTLFEEMDEQADGITFKYSFDDIAKSNALVVTEFVNFERDSTVALLASLLTL |
| | | PAHQSQCLRFELLTSLALIHCKGQQIANIDDVKRWYVTTGESSSIVGEDPAEDWVALVDNKK |
| | | GDYRVLEGVWEAAGFYTQLMVEIVSDMPDTHRYRSLKLAIQAILRLSDVICARSGLYRFQEG |
| | | ADEFPDSLDTAGLDEKTLCSRVTLSERSLRAEGIKLADLAPFILEPSHISMLGNQVPGEGML |
| | | EQRPLLRTRDGIVVVLPTAMTIALRQAVITFAKRTEELSELDKALANVYSLTFSEMPVFGNG |
| | | GRLRRLTWEKYKMSRTTMVTSIVDAGHLMVLQFVLPSIQQYADTGFNNLLQLDEETTQFLDN |
| | | SVEQITVDLAKQPGFQRGIVVRIACGWGAGFMGVPPQLPDGWGFEWMSGADFVRFGALPDMS |
| | | PIAFWRVQDAVETIRQAGVRLINMSGTLNLLGWIRANDGHMVPHDQLPDDRITPEHPLMLMI |
| | | PTNLLRGIRIAADTGYDRHRISDNNGKWHRVMRPSAEDFFPTERQSKCYASIDDLEAQRLTC |
| | | VYEGQGNLWVTLEAPEMEDWMLLVELAKMVRTWIGRIGEALEVLSEQPIKKSLKVYLHFDGN |
| | | DNIGRFDGENSDDMNTFWRLERIHEHGAIRVVLQDGYLAGFRLPDNRAERALVRALGTAFAT |
| | | LLRMKEPVDKGVTVEQIAVPNDRARSFHIMQAYDFNQYLGRSLTKRLLAEDIDSAAARELAW |
| | | RAVSTDAPSRYQGKKEVGKLLNDWDVLIQDLLSELSRFDRKQTVMRLLENVVKARCEEAHWR |
| | | STAAAVLGLHAGEEGVEETIAQEMSRYAGAALTSRLIIELAICVCPTSGGIEPSDMALSKLL |
| | | ARASLLFRIGGMSDAVRFGALPADIRISPLGDLLFRDELGKMVLEPMLSKVTNERFEEQAAQ |
| | | FEQHYVKTAGGDDENSKQDSVAAETTEDQTDIFLAFWKAEMGFTLEDGMRFIQFLESIGEQE |
| | | SAEEMRRSQLADAAKSAGLADETIDAFLNQFILSARPKWDVVPDGFDLSDIYPWRFGRRLSV |
| | | AVRPLLQEESHDPLIVIAPGLLNLSLKYVFDGAYTGQFKRDFFRTEGMRDTWLGGAREGHTF |
| | | EKTLERELRETGWTVRRGIGFPEERRNLPGDPGDIDLLAWRSDRNQVLVECKDLSLARNYSE |
| | | VASQLSEYQGDDIKGKPDKLKKHLKRVLLAKENIDNFAKFTSIANPEIVSWLVFSGASPIAY |
| | | AQSKEALAGTNVGRPSDLLNF* (SEQ ID NO: 201) |
| 26 | A | MDYLSEVLKIIEGATKANASMASNYAGLLADKLEQKGEVKQARMIRERLLRAPQALAGAQRA |
| | | GGGISLGSLPVDIDSRLNTVDVSYPKLDSSEIFLPAAISTRVEEFITNVQRYDEFVKADAAL |
| | | PSRMLVYGKPGTGKTMLSKYIATRLDFPLLTVRCDTLISSLLGQTSKNLRQVFDYVMQRPSV |
| | | LFLDEFDALAGARGNERDIGELQRVVTSLLQNMDAASEDTVIIASTNHEQLLDPAIWRRFSF |
| | | RIPMPLPDIHQRELIWKNRLKNMICSDLDLSDLSRKSEGLSGAIIEQVSLDARRDAVIEGAS |
| | | VINHHKLYRRLYLAQSLMEGVNLSTYEDEIRWLRSKDKKLFSIRVLANLYKLTSRVISNILK |
| | | ESGAYEQKGYTV* (SEQ ID NO: 202) |
| | B | MSRRGTQFSNAKVTNPMLRIPFSSSDLGAIVNAGGGAKVLVDVTAEYRQGLVRNLTTSKHYL |
| | | ESKLSEYPGSLGTLVFKLRDQGIAKTHRPNKIAQEAGLQNAGHAKIDEMLVAAHAGCFDVLE |
| | | SVILHRNIKAILANLSAERIEPWDENRKVPGGTDGLFESSNILVRLFEYTGEDATYNNYENV |
| | | ISILEQHGVKYDEIRQKCGLPLLRIMDLSPNDRYILDILIDYPGIRTLIPEPKYSAFPVSVS |
| | | DSVGIETNSFPVPSEELPIVAVFDTGVSPIAATITPWVVSRETYVIPPDTSYEHGTMVSSLI |
| | | SGAHFLNDNHPWIPDTKSKIHDVCALDENGSYISDLILRLADAVNKRPDIKVWNLSLGGGPC |
| | | NEQTFSDFAMELDRLSDKFGILFVVAAGNYVDEPIRTWPNPDPLGGADLISSPGESVRALTV |
| | | GSVSHMEANDALSEIGTPTPYTRRGPGPVFTPKPDIIHAGGGVHRPWNVGASSLKVVGPDNR |
| | | LCSNFGTSFAAPIVASLAAHTWQRIATNTDFNVSPSLIKALLIHSAQLSSPDYSPSERRYLG |
| | | AGIPNEVIETLYDSDDRFTLIFQTFLVPGVRWRKDNYPIPSALIQNGKFKGEIVITAAYAPP |
| | | LNPNAGSEYVRANVELSFGLIENNTIKGKVPMEGENGQSGYERAQIEHGGKWSPVKIHRKAF |
| | | NKGITSGNWALQAKTTLRANEPALMEPLPVTIVVTLKSLDGNTQVYADGVRALNANNWAHYP |
| | | LPARVPVSV* (SEQ ID NO: 203) |
| 27 | A | MKTVRSACQLQPKALEINVGDQIEQLDQIINDTNGQEYFKKTFITDGFKTLLSKGMARLAGK |
| | | SNDTVFHLKQAMGGGKTHLMVGFGLLAKDAALRNSHLGSMPYQSDFGSAKIAAFNGRNNPHS |
| | | YFWGEIARQLGREGVFREYWESGAKAPDEQAWINIFDGEEPILILLDEMPPYFHYYSTQVLG |
| | | QGTIADVVTRAFSNMLTAAQKKKNVCIVVSDLEAAYDTGGKLIQRALDDATQELGRAEVSIT |
| | | PVNLESNEIYEILRKRLFLSLPDKNEVSEIASIYASRLAEAAKAKTVERSAEALANDIESTY |
| | | PFHPSFKSIVALFKENEKFKQTRGLMELVSRLLKSVWESDEEVYLIGAQHFDLSIHDVREKL |
| | | AEISEMRDVIARDLWDSTDSAHAQIIDLNNGNHYAQQVGTLLLTASLSTAVNSVKGLTESEM |
| | | LECLIDPNHQGSDYRNAFTELAKSAWYLHQTQEGRNYFSHQENLTKKLQGYADKAPQNKVDE |
| | | LIRHRLEEMYRPVTKEAYEKVLPLPEMDEAQATLRSGRALLIISPDGKTPPGVVGNFFKGLV |
| | | NKNNILVLTGDKSSIASIEKAARHVYAVTKADNEITASHPQRKELDEKKAQYEQDFQTTVLS |
| | | VFDKLLFPGNNRGEDVLRPKALDSTYPSNEPYNGERQVVKTLTSDPIKLYTQINENFDALRA |
| | | RAESLLFGTLDEARKTDLLDKMKQKTQMPWLPSRGFDQLAIEAYQRGVWEDLGNGYITKKPK |
| | | PKTTEVIISEDSSPDDAGTVRLKIGVANAGNSPRIHYAEDDEVTESSPVLSDNTLATKALRV |
| | | QFLAVDPTGKNLTGNPTTWKNRLTLRNRFDEVARTVELFVAPRGTIKYTLDGSEARNGETYT |
| | | VPIQLADQEATIYVFAECDGLEEKRNFTFAAAGSKEIPIIKDKPATLVSPSPKRMDSSAKTY |
| | | EGLKIAKEKGIEFEQISLMVGSAPKVIHISLGEMKISAEFIETVLTHLQTVLSPEAPVVMTF |
| | | KKAYTQTGHDLEQFVKQLGIEIGNGEVEQR* (SEQ ID NO: 204) |
| | B | MNKTVDFGAPSEFGMHHFYVEIPAAPRDAVVIYEDYGFDGEDSRRETVECRLILARELWTKI |
| | | RDDVRRDFNARLKIKKQSSGTWSTGKVKLDRFLGRELCVLGWAAEHASPDECLVICQKWLAL |
| | | RPEERWWLYSKTAAEAGRDDQTQRGWRKALYCALSDGANIKLETKKKPKSKKLQVEDETQDL |
| | | FGFMEKGEF* (SEQ ID NO: 205) |
| | C | MALQPFEWRDKPSLIEHLFPVQKISAETFKERMASHGQLLVSLGAFWKGRKPLHNKACILGS |
| | | LLPATDNPLEDLEVFELLMGIDSESMQKRIEASLPASKQETIGDYLVLPYAEQIRIAKRPEE |
| | | IDESLFVHIWNRVNNHLGTSAHTFAQLVEELGVARFGHRPRVADVFSGSGQIPFEAARLGCD |
| | | VYASDLNPISCMLTWGALNVVGASAQKRVEIDKAQRDIVKKVQKEIDELDIESDGRGWRAKV |
| | | FLYCVEVTCPESGWRVPLIPSLIISNSFRVVAELKPVPAERRYDISIREVSTDEELEFYKSG |
| | | TIQDGEVIHSPDGKTQYRVNDCTIRGDYKEGKENLNKLRMWEKTDFAPRPDDIFQDRLFCVQ |
| | | WMKKKPKGSQYYYEFRTVTNDDLKREKKVIEHVASKLDDWQKQGLVPDMVIEAGDKTDEPIR |
| | | TRGWTHWHHLFHPRQLLFLSLVNKYSLAEGKFNFLQCMNFILSKLTRWRPQAGGGGGSAATF |
| | | DNQALNTLYNYPVRATGSIENILAAQHNHCGISENVSFVVNSHPAPELDVENDIYITDPPYG |
| | | DAVKYEEITEFFIAWLRKNPPKEFAHWTWDSRRSLAVKGEDEGFRTGMVAAYRKMAQKMPDN |
| | | GLQVLMFTHQSGAIWADMANIIWASGLQVTAAWYVVTETDSALRGGSNVKGTIILILRKRHQ |
| | | ALETFRDDLGWEIEEAVKEQVESLIGLDKKVRSQGAEGLYTDADLQMAGYAAALKVLTAYSR |
| | | IDGKDMVTEAEAPRQKGKKTFVDELIDFAVQTAVQFLVPVGFEKSEWQKLQAVERFYLKMAE |
| | | MEHQGAKTLDNYQNFAKAFKVHHFDQLMSDASKANSARLKLSTEFRSTMMSGDAEMTGTPLR |
| | | ALLYALFEISKEVEVDDVLLHLMENCPNYLPNKQLLAKMADYLAEKREGLKGTKTFNPEQEA |
| | | SSARVLAEAIRNQRL* (SEQ ID NO: 206) |
| | D | MAIKRFSSRTERLDTEFLAESLKGAAKYFRIAGYFRSSIFELVGEEIAKIPEVKIICNSELD |
| | | LADFQVATGRNTALKERWNEVDVEAEALLKKERYQILDQLLHSGNVEIRWPRERLFLFIGKA |
| | | GSIHYADGSRKSFIGSVNESKSAFAHNYELVWQDDDEESADWVEREFWALWTEGVPLPDAIL |
| | | AEIHRVSNRREVTVDVLKPEEVPAAAMAEAPIYRGGEQLQPWQRSFVTMFLEHREIYGKARL |
| | | LLADEVGVGKTLSMATSALVSALLDDGPVLILAPSTLTIQWQIEMMDKLGVPAAVWSSQKKV |
| | | WLGVEGQILSPRGDASSIKKCPYRIAIISTGLIMHQREKTDFVKEAGMLLKNRFGTVILDEA |
| | | HKARIRGGLGDQASEPNNLMAFMLQIGRRTRHLVLGTATPIQTNVRELWDLLGILNSGAEFV |
| | | LGDALSPWHDHEQAIPLITGQTQVTSEAEVWHWLSNPLPPSNEHHTVQQIRDYLSIDNKSFG |
| | | YSHRFEDLDYMIQSLWLSECMTPSFFKENNPILRHTVLRKRKQLEDDGLLERVGVNTHPIKR |
| | | NLAQYQSRFVGLGIPTNTPFQVAYEKAEEFSKLLQSRTRAAGFMKSLMLQRICSSFASGLKT |
| | | AQKMLKHTVSDEDEDLVEDVEHLLSEMTPAEVACLREIETQLSRPEAVDSKLNTVKWFLTEF |
| | | RTDGKTWLEHGCIIFSQYYDTAEWTAKELAKSLKGEVVAVYAGVGKSGLFRGEQFNNVEREL |
| | | IKSAVKTREILLVVATDAACEGLNLQTLGTLINVDLPWNPSRLEQRLGRIKRFGQTRKFVDM |
| | | LNLWSETQDEKVYNVLSERLRDTYDIFGSLPDTIDDEWIDNEEELNTRMDEYMHERKKAQDA |
| | | FSVKYRGTLDPDAHLWERCATVLSRRDIVSKLSEPWGS* (SEQ ID NO: 207) |
| 28 | A | MSEQFVSEAAGTPHLAEQDDGLKNLKLLEESFNTDKLNSSEQKKLQELRSILSPLLKKGGVL |
| | | ADLFQDGKDVLAFPIDVDSVLQHLNQDMRDDWFTDTLQHKDLLSNKQSLHEVLHELLNEGNG |
| | | QYIGSFRSVYNIPKKGLGIRYSLETDFYDRFIYQAICTFLIQFYDPLLSHRVLSHRFNKDRK |
| | | SEKYIFKSRIDLWQTFEGVTRTALSNNQSLLATDLINCYENITIETIRTAFERSIEHINTSG |
| | | PNKVLIRNAVQTLCNLLSRWGYSERHGLPQNRDASSFIANWLNDIDHEMVRLGYDYYRYVDD |
| | | IRYICPNTRVAKKALTELINQLRKVGMNINSGKTKILTQDSTANEVDEFFPTSDDRSLTIDN |
| | | MWRSRSRRVIARSAKYIFQELKECIEEKQTQSRQFRFAVNRLIKLTDAGIFDIHATIATDLK |
| | | ALLISSLEDHAASTDQYCRLLGILDLNEHELNDIYNHLSDHERSVHSWQNFHLWLLLANRKY |
| | | KSTNLITLATARIESDILQPEIAAIFIYLKCVGEAQVLIDNISKFESAWPYYHQRNFLLACS |
| | | DFDHNQLKPLISKLGPKLKWTGSRAKPYFTNGMPLVERDKIAMLDLYDEITPYD* |
| | | (SEQ ID NO: 208) |
| | B | MTESKKALLFIADYTDQGQDRIFLWSDGTLGEVTISDLVDQKHELVCHDLWLIAPSLYRATN |
| | | KLPSNITDIEELRILTSGKKKERESRDKKDISQLLSSFVSEETIARYKEIFNRKIPLDEAVL |
| | | SSIGEALLKCSEWKSDANTAGEWERFITERPVNDYLIRSTSEGISISEEKLRYHKNKIEFEF |
| | | YMALKSFSSDYDMPLEVPSDQAVIEYLEPKGFDFTGLDVDYILNFVPMQSHFAEDLIRLRKI |
| | | QNSRRVLAAIPLSQSRIYPIVDSFGSITSRIYFKDPSLQNLAKHHRDILIPDTNKQLSYIDY |
| | | DQFEAGVMAALSGDEKLLELYNSSDVYEIAAKEIFDDKSKRKQAKRLFLSYAYGMKRQHILA |
| | | AAQGFGADRQNAKKFFEQFKTFEAWKVLVHEEFHRTGRIGTALGNYMHRERKGELTSKEKRS |
| | | AISQIVQGTASLIFKKALLCLSSISEVKLKLPMHDAVLLEHPADYDMDRVINIFSEIMSEHF |
| | | QNKIQGKASLSQFHEDL* (SEQ ID NO: 209) |
| 29 | A | MSVIRGLAAVLRQSDSDISAFLVTAPRKYKVYKIPKRTTGFRVIAQPAKGLKDIQRAFVQLY |
| | | SLPVHDASMAYMKGKGIRDNAAAHAGNQYLLKADLEDFFNSITPAIFWRCIEMSSAQTPQFE |
| | | PQDKLFIEKILFWQPIKRRKTKLILSVGAPSSPVISNFCMYEFDNRIHAACKKVEITYTRYA |
| | | DDLTFSSNIPDVLKAVPSTLEVLLKDLFGSALRLNHSKTVFSSKAHNRHVTGITINNEETLS |
| | | LGRDRKRFIKHLINQYKYGLLDNEDKAYLIGLLAFASHIEPSFITRMNEKYSLELMERLRGQ |
| | | R* (SEQ ID NO: 210) |
| | B | MTKQYERKAKGGNLLSAFELYQRNSDKAPGLGEMLVGEWFEMCRDYIQDGHVDESGIFRPDN |
| | | AFYLRRLTLKDFRRFSLLEIKLEEDLTVIIGNNGKGKTSILYAIAKTLSWFVANILKEGGSG |
| | | QRLSEMTDIKNDAEDRYSDVSSTFFFGKGLKSVPIRLSRSALGTAERRDSEVKPAKDLADIW |
| | | RVINEVNTINLPTFALYNVERSQPFNRNIKDNTGRREERFDAYSQTLGGAGRFDHFVEWYIY |
| | | LHKRTVSDISSSIKELEQQVNDLQRTVDGGMVSVKSLLEQMKFKLSEAIERNDAAVSSRVLT |
| | | ESVQKSIVEKAICSVVPSISNIWVEMITGSDLVKVTNDGHDVTIDQLSDGQRVFLSLVADLA |
| | | RRMVMLNPLLENPLEGRGIVLIDETELHLHPKWQQEVILNLRSAFPNIQFITTTHSPIVLST |
| | | IEKRCIREFEPNDDGDQSFLDSPDMQTKGSENAQILEQVMNVHSTPPGIAESHWLGNFELLL |
| | | LDNSGELDNHSQVLYDQIKAHFGIDSIELKKADSLIRINKMKNKLNKIRAEKGK* |
| | | (SEQ ID NO: 211) |
| | C | MRELARLERPEILDQYIAGQNDWMEIDQSAVWPKLTEMQGGFCAYCECRLNRCHIEHFRPRG |
| | | KFPALTFIWNNLFGSCGDSRKSGGWSRCGIYKDNGAGAYNADDLIKPDEENPDDYLLFLTTG |
| | | EVVPAIGLTGRALKKAQETIRVFNLNGDIKLFGSRRTAVQAIMPNVEYLYTLLEEFDEDDWN |
| | | EMLRDELEKIESDEYKTALKHAWTFNQEFA* (SEQ ID NO: 212) |

[0317] Sequence of vector backbone. Inserts were cloned between the HindIII and EcoRI restriction sites (underlined).

(SEQ ID NO: 213)
CCCGCGCCCACCGGAAGGAGCTGACTGGGTTGAAGGCTCTCAAGGGCATC
GGTCGAGATCCCGGTGCCTAATGAGTGAGCTAACTTACATTAATTGCGTT
GCGCAAGCTTCTGCAGAATTCGCAATAACTAGCATAACCCCTTGGGGCCT
CTAAACGGGTCTTGAGGGGTTTTTTGCTGAAACCTCAGGCATTTGAGAAG
CACACGGTCACACTGCTTCCGGTAGTCAATAAACCGGTAAACCAGCAATA
GACATAAGCGGCTATTTAACGACCCTGCCCTGAACCGACGACCGGGTCGA
ATTTGCTTTCGAATTTCTGCCATTCATCCGCTTATTATCACTTATTCAGG
CGTAGCACCAGGCGTTTAAGGGCACCAATAACTGCCTTAAAAAAATTACG
CCCCGCCCTGCCACTCATCGCAATACTGTTGTAATTCATTTAACATTCTG
CCGACATGGAAGCCATCACAGACGGCATGATGAACCTGAATCGCCAGCGG
CATCAGCACCTTGTCGCCTTGCGTATAATATTTGCCCATAGTGAAAACGG
GGGCGAAGAAGTTGTCCATATTGGCCACGTTTAAATCAAAACTGGTGAAA
CTCACCCAGGGATTGGCTGAGACGAAAAACATATTCTCAATAAACCCTTT
AGGGAAATAGGCCAGGTTTTCACCGTAACACGCCACATCTTGCGAATATA
TGTGTAGAAACTGCCGGAAATCGTCGTGGTATTCACTCCAGAGCGATGAA
AACGTTTCAGTTTGCTCATGGAAAACGGTGTAACAAGGGTGAACACTATC
CCATATCACCAGCTCACCGTCTTTCATCGCCATACGGAACTCTGGATGAG
CATTCATCAGGCGGGCAAGAATGTGAATAAAGGCCGGATAAAACTTGTGC
TTATTTTTCTTTACGGTCTTTAAAAAGGCCGTAATATCCAGCTGAACGGT
CTGGTTATAGGTACATTGAGCAACTGACTGAAATGCCTCAAAATGTTCTT
TACGATGCCATTGGGATATATCAACGGTGGTATATCCAGTGATTTTTTTC
TCCATTTTAGCTTCCTTAGCTCCTGAAAATCTCGATAACTCAAAAAATAC
GCCCGGTAGTGATCTTATTTCATTATGGTGAAAGTTGGAACCTCTTACGT
GCCGATCAACGTCTCATTTTCGCCAAAAGTTGGCCCAGGGCTTCCCGGTA
TCAACAGGGACACCAGGATTTATTTATTCTGCGAAGTGATCTTCCGTCAC
AGGTATTTATTCGGCGCAAAGTGCGTCGGGTGATGCTGCCAACTTACTGA
TTTAGTGTATGATGGTGTTTTTGAGGTGCTCCAGTGGCTTCTGTTTCTAT
CAGCTGTCCCTCCTGTTCAGCTACTGACGGGGTGGTGCGTAACGGCAAAA
GCACCGCCGGACATCAGCGCTAGCGGAGTGTATACTGGCTTACTATGTTG
GCACTGATGAGGGTGTCAGTGAAGTGCTTCATGTGGCAGGAGAAAAAAGG
CTGCACCGGTGCGTCAGCAGAATATGTGATACAGGATATATTCCGCTTCC
TCGCTCACTGACTCGCTACGCTCGGTCGTTCGACTGCGGCGAGCGGAAAT
GGCTTACGAACGGGGCGGAGATTTCCTGGAAGATGCCAGGAAGATACTTA
ACAGGGAAGTGAGAGGGCCGCGGCAAAGCCGTTTTTCCATAGGCTCCGCC
CCCCTGACAAGCATCACGAAATCTGACGCTCAAATCAGTGGTGGCGAAAC
CCGACAGGACTATAAAGATACCAGGCGTTTCCCCCTGGCGGCTCCCTCGT
GCGCTCTCCTGTTCCTGCCTTTCGGTTTACCGGTGTCATTCCGCTGTTAT
GGCCGCGTTTGTCTCATTCCACGCCTGACACTCAGTTCCGGGTAGGCAGT
TCGCTCCAAGCTGGACTGTATGCACGAACCCCCCGTTCAGTCCGACCGCT
GCGCCTTATCCGGTAACTATCGTCTTGAGTCCAACCCGGAAAGACATGCA
AAAGCACCACTGGCAGCAGCCACTGGTAATTGATTTAGAGGAGTTAGTCT
TGAAGTCATGCGCCGGTTAAGGCTAAACTGAAAGGACAAGTTTTGGTGAC
TGCGCTCCTCCAAGCCAGTTACCTCGGTTCAAAGAGTTGGTAGCTCAGAG
AACCTTCGAAAAACCGCCCTGCAAGGCGGTTTTTTCGTTTTCAGAGCAAG
AGATTACGCGCAGACCAAAACGATCTCAAGAAGATCATCTTATTAATCAG
ATAAAATATTTCTAGATTTCAGTGCAATTTATCTCTTCAAATGTAGCACC
TGAAGTCAGCCCCATACGATATAAGTTGTAATTCTCATGTTAGTCATGC

### Example 3—Diverse Enzymatic Activities Mediate Antiviral Immunity in Prokaryotes

[0318] Bacteria and archaea are frequently attacked by viruses and other mobile genetic elements and rely on dedicated antiviral defense systems, such as restriction endonucleases and CRISPR, to survive. The enormous diversity of viruses suggests that more types of defense systems exist than are currently known. By systematic defense gene prediction and heterologous reconstitution, here Applicants discovered 29 widespread antiviral gene cassettes, collectively present in 32% of all sequenced bacterial and archaeal genomes, which mediate protection against specific bacteriophages. These systems incorporate enzymatic activities not previously implicated in antiviral defense, including RNA editing and retron msDNA synthesis. In addition, Applicants found a diverse set of other defense genes. These results highlight an immense array of molecular functions that microbes employ against viruses.

[0319] Domain-independent identification of uncharacterized defense systems

[0320] Many antiviral defense genes in bacterial and archaeal genomes show a distinctive tendency to cluster together within defense ‘islands’ (7, 10). As a consequence, an uncharacterized gene whose homologs consistently occur next to, for instance, restriction-modification genes has an increased likelihood of being involved in defense (11, 12).

[0321] Applicants found that additional, unknown defense systems exist which either lack annotated domains, or only contain domains that are not typically associated with defense but have been co-opted in specific instances to perform defense functions. Applicants developed an expanded computational approach in which novel defense systems were identified independent of domain annotations (FIG. 16A). Applicants analyzed all bacterial and archaeal genomes available in Genbank as of November 2018, collectively encoding 620 million proteins. To identify candidate novel defense genes, Applicants first compiled a list of all genes within 10 kb or 10 open reading frames away from known defense systems (see Methods). This initial list (n=8.7×10⁶) which evidently contained both novel defense genes and non-defense ones, was clustered to yield 6×10⁵ representative sequences (“seeds”). To distinguish between defense and non-defense seeds, Applicants identified all homologs of each seed present in Genbank and analyzed their gene neighborhoods. The seed was predicted to be a defense gene if these neighborhoods resembled those of known defense gene—in particular, if a high percentage of homologs were located in proximity to known defense genes (“defense score”) and displayed context diversity (FIGS. 16B, 21A-21D, and Methods). All clustering and homolog detection steps were performed based on amino acid sequences, without invoking existing domain annotations and thus allowing the identification of novel types of defense genes.

[0322] After all filtering and curation steps, Applicants identified a total of 7,472 seeds that represented candidate defense genes, along with 4,555 seeds for known defense genes under the same analysis parameters (FIG. 16C). These seeds were analyzed with additional, more sensitive analysis of their domain content. Of the uncharacterized genes, 1,687 (23%) had either no annotated domains or contained only domains of unknown function (DUFs), and an additional 2,756 (37%) contained only domains that are different from the characteristic domains of known defense genes. These results suggested the existence of a diverse set of defense genes with mechanisms that remain to be investigated.

[0323] Candidate defense systems exhibit antiviral activity in a heterologous system

[0324] To characterize the functional diversity among the predicted defense genes, Applicants selected 48 candidate systems to test experimentally for defense activity. Candidate systems were prioritized based on the presence of predicted molecular functions not previously implicated in defense; broad phylogenetic distribution; the presence of at least one protein larger than 300 amino acids (to increase the likelihood of the presence of enzymes); and, for multi-gene systems, conservation of the component genes. Because wild-type bacterial strains are likely to harbor multiple active defense systems, thereby maintaining phage resistance even if one of the systems were knocked out (13), Applicants elected to assay activity by heterologous reconstitution. For each system, 1-4 homologs were selected, cloned from the source organism into the low-copy vector pACYC and transformed into Escherichia coli (FIG. 17A), comprising a total of 395 kb of exogenous DNA (see tables 9-16 for sequence, accession, and source organism information). Three previously identified defense systems, BREX type I (13, 14), Druantia type I (4), and the abortive infection reverse transcriptase RT-Abi-P2 (15) were included as positive controls. Each system was then challenged with a diverse panel of coliphages with dsDNA, ssDNA, or ssRNA genomes, and phage sensitivity of the bacteria was compared to that observed with the empty vector control (FIGS. 17B-17C).

[0325] Applicants observed anti-phage activity for 29 of the 48 tested candidates (60%) (FIG. 22). Systems from source organisms outside the Enterobacteriaceae family, which had Escherichia and closely-related genera including Salmonella and Klebsiella, had little to no activity, suggesting the importance of host compatibility. The most active representative in each of these 29 systems (representing 4% of the uncharacterized defense seeds) was further tested with an expanded panel of phages in two E. coli strains (FIGS. 17D and 23). All 29 systems were active against at least one dsDNA phage, and four were active against ssDNA phages (M13 or φX174). Phage specificity was typically narrow and varied widely across systems. The abundance of these defense systems among the sequenced bacterial and archaeal genomes spans two orders of magnitude, ranging from ˜0.1% to ˜10% of the genomes (FIG. 17D). Overall, 32% of all sequenced bacterial and archaeal genomes contain at least one of these novel defense systems, which are broadly distributed across bacterial and archaeal phyla (FIG. 24).

[0326] RADAR with a divergent adenosine deaminase that edits RNA in response to phage infection

[0327] Applicants identified a two-gene cassette consisting of an ATPase (˜900 residues) and a divergent adenosine deaminase (˜900 residues) that was active against dsDNA phages T2, T3, T4, and T5. Because deaminase activity had not been previously implicated in antiviral defense, Applicants focused on this system for further investigation. The system appeared in diverse defense contexts and forms three subtypes (FIGS. 18A and 25A). In most cases, it had the ATPase and deaminase only, but some variants also included a small membrane protein, either a SLATT domain (16) or the type VI-B CRISPR ancillary protein Csx27 (17). Mutations in the ATPase Walker B motif or in the putative divalent metal cation-binding H×H motif of the deaminase abolished defense activity, whereas the SLATT domain membrane protein was required for resistance against phage T5 but not against phage T2 (FIG. 18B).

[0328] Given the large size of the deaminase compared to typical metabolic adenosine deaminases and its sequence divergence due to large insertions within the deaminase domain (FIG. 25B), Applicants found that it acted on nucleic acids rather than on free nucleosides or nucleotides. Applicants performed whole-transcriptome sequencing and found an enrichment of A to G substitutions in sequencing reads at specific sites in the presence of phage, whereas C, G, or U bases were not affected (FIGS. 18C and 26A), consistent with RNA editing of adenosine to inosine. Furthermore, the overall expression of phage genes, including early genes, was reduced by ˜100-fold even at a multiplicity of infection (MOI) of 2 (FIG. 18D). Since most of the cells in the culture were expected to be infected, this suggested that defense activity occurs early in the infection cycle, which was not evident from efficiency of plating (EOP) alone.

[0329] RNA editing occurred only when both the defense system and the phage were present; expression of the defense system without the phage resulted in a near-baseline level of editing, and no editing was detected in the absence of the system. Mutations in the ATPase or deaminase active sites abolished editing, and no DNA editing was detected (FIG. 26B). Editing sites were broadly distributed throughout the E. coli transcriptome (FIGS. 18E, 26A, 27, and table 17), and editing could also be induced by co-expressing specific phage proteins with the system (FIGS. 28A-28F and table 18). RNA secondary structure predictions indicated a characteristic stem-loop structure at strong editing sites; specific adenosines in loops were edited with up to ˜90% frequency, whereas adenosines within the stem were not edited within the limit of detection (FIGS. 18E and 27). Finally, some of the editing sites were deleterious to the host cell, resulting in nonsynonymous mutations such as at the UAA stop codon of the transfer messenger RNA (tmRNA) (FIG. 28B), which rescues ribosomes stalled during translation (18).

[0330] Based on these results, Applicants named this system phage restriction by an adenosine deaminase acting on RNA (RADAR). Growth kinetics at varying phage multiplicity of infection (MOI) revealed a threshold MOI above which RADAR-expressing cells had a lower OD600 compared to the empty vector control, suggestive of RADAR-mediated growth arrest (FIG. 18F). Together with the abundance and broad distribution of editing sites in the host transcriptome (FIGS. 26A-26B, 27), these results are consistent with an editing-dependent abortive infection mechanism that is activated by phage.

[0331] A widespread family of defense systems containing reverse transcriptases

[0332] Applicants discovered that a family of uncharacterized reverse transcriptases (RTs) are active defense systems. Although most RTs in prokaryotes are components of mobile retroelements, distinct clades of RTs that lack the hallmarks of mobility also exist, including 16 ‘unknown groups’ (UGs) (19-22). Applicants independently identified many of these uncharacterized RTs via the pipeline, suggesting that they might be defense genes (FIG. 19A). Indeed, six of these candidates (UG1, UG2, UG3, UG8, UG15, and UG16) provided robust protection against dsDNA phages. In all cases, mutations in the RT active site ((Y/F)×DD (SEQ ID NOS: 1-2) to (Y/F)×AA) abolished activity (FIGS. 19B and 29A-29B). Applicants named these genes defense-associated RTs (DRTs).

[0333] Each of these RT systems displayed a distinct pattern of phage resistance (FIG. 17D). Moreover, while UG2 (drt2), UG15 (drt4), and UG16 (drt5) act as individual genes, the UG3 (drt3a) and UG8 (drt3b) RTs were components of the same defense system (DRT type 3), with both RTs required for defense activity. Like RADAR, some subtypes of the UG1 (DRT type 1) and DRT type 3 systems were also associated with small membrane proteins (FIG. 19A). Moreover, DRT type 1 encompassed a much larger protein (˜1200 residues) than the other five RTs and also contains a C-terminal nitrilase domain. Mutation of the catalytic cysteine of the nitrilase (C1119A) abolished the activity (FIG. 19B). Nitrilases typically function in processes unrelated to defense, such as nucleotide metabolism and small molecule biosynthesis (23). Thus, DRT type 1, which is divergent from typical nitrilases and forms a distinct clade in the phylogenetic tree of the nitrilase family (FIGS. 30A-30C), exemplifies a non-defense domain that was apparently co-opted for a defense function.

[0334] To further characterize these RTs, Applicants performed whole transcriptome sequencing of RT-expressing E. coli during phage infection. These experiments revealed substantial differences in phage gene expression across the different RTs (FIG. 19C). For instance, DRT type 1 strongly suppressed the expression of phage late genes, such as capsid proteins, whereas early and middle genes were not substantially affected, suggesting that it is active prior to the late stage of infection but does not prevent the injection of phage DNA into the host cell. In contrast, DRT type 3 did not strongly suppress expression of any of the phage genes, despite growing at a rate similar to DRT type 1 during phage infection (FIG. 31A). Transcriptome sequencing also identified a highly expressed, structured non-coding RNA at the 3′ end of the DRT type 3 system that is required for activity (FIGS. 19B, 19D-19E).

[0335] Retrons Mediate Anti-Phage Defense

[0336] Applicants also found that retrons, a distinct class of RTs that produce extrachromosomal satellite DNA (multi-copy single-stranded DNA, msDNA), are active anti-phage defense systems. The retron msDNA is produced from the 5′ UTR of its own mRNA and is covalently linked to an internal guanosine of the RNA via a 2′-5′ phosphodiester bond (24). First identified over 30 years ago, retrons have been harnessed for bacterial genome engineering (25), but their native biological function has remained unknown. Applicants found that the original E. coli retrons Ec67 (26) and Ec86 (27), as well as a homolog of the Ec78 retron (28) and a novel TIR (Toll/interleukin 1 receptor) domain-associated retron, mediate defense against dsDNA phages. Of note, the Ec86 retron is natively present in the widely-used laboratory E. coli strain BL21. Mutations in the (Y/F)×DD (SEQ ID NOS: 1-2) active site motif of the RT, as well as at the branching guanosine, abolished activity, indicating that the defense function depends on msDNA synthesis (FIGS. 19B and 29C). Furthermore, perturbations to the msDNA also abolished activity (FIG. 31), suggesting that its structure, and not simply formation, is essential for the defense activity. Indeed, a single nucleotide mismatch in the msDNA hairpin reduced activity by 100-1000 fold, but introducing a second mutation on the complementary strand to restore the structure of the msDNA also restored wild-type activity (FIG. 31). Notably, these retrons are associated with other domains, including TOPRIM (topoisomerase-primase) (29), TIR (30), a nucleoside deoxyribosyltransferase-like enzyme, and the Septu defense system (4), all of which play a role for activity (FIG. 19B).

[0337] Additional Molecular Functions of Defense Systems

[0338] Applicants investigated several additional systems with diverse components (FIGS. 20, 32A-32B). These include a three-gene system containing a von Willebrand factor A (vWA) metal ion binding protein, a PP2C-like serine/threonine protein phosphatase, and a serine/threonine protein kinase that provided strong protection against T7-like phages (T3, T7, and φV-1). This system, dubbed TerY-phosphorylation triad (TerY-P), has been previously analyzed computationally in the context of tellurite resistance-associated stress response and might operate as a phosphorylation switch that couples the activities of the kinase and the phosphatase (31).

[0339] Additional systems include proteins containing a SIR2 (sirtuin) deacetylase domain that is also present in the recently-discovered Thoeris system (4) and has also been detected in the same neighborhoods with prokaryotic Argonaute proteins (32); ApeA, a predicted HEPN-family abortive infection protein (33) and a putative ancestor of the type VI CRISPR effector Cas13; a ˜1300 residue P-loop ATPase containing an unusual insertion of two transmembrane helices into the ATPase domain, similar to the KAP ATPases (34); and a four-gene cassette containing a 7-cyano-7-deazaguanine synthase-like protein (QueC), suggestive of small molecule biosynthesis. All of these components are essential for defense activity (FIG. 20).

[0340] Finally, Applicants also demonstrated defense functions for several predicted NTPases of the STAND (signal transduction ATPases with numerous associated domains) superfamily (FIG. 20). This expansive superfamily comprise multidomain proteins that include eukaryotic ATPases and GTPases involved in programmed cell death and various forms of signal transduction (35, 36). Typically, STAND NTPases contain a C-terminal helical sensor domain that, upon target recognition, induces oligomerization via ATP or GTP hydrolysis, leading to activation of the N-terminal effector domain. The role of the STAND NTPases in prokaryotes has long remained enigmatic (35, 37); the few for which experimental data are available contain a helix-turn-helix domain and have been shown to regulate transcription (36). Several STAND NTPases were active against dsDNA phages (FIG. 17D); these proteins contained different putative effector domains, including DUF4297 (a putative PD-(D/E)×K-family nuclease), an Mrr-like nuclease, SIR2, a trypsin-like serine protease, and an uncharacterized helical domain. Applicants named these systems antiviral ATPases/NTPases of the STAND superfamily (AVAST). As homologs of essential eukaryotic programmed cell death effectors, AVAST systems are likely to function via an abortive infection mechanism, i.e. by causing growth arrest or programmed cell death in infected hosts.

[0341] These findings substantially expanded the space of protein domains, molecular functions, and interactions that are employed by bacteria and archaea in antiviral defense. Some of these functions, including RNA editing, have not been previously implicated in defense mechanisms. The high success rate of defense system prediction based on the evolutionary conservation of their proximity to previously identified defense genes supported the defense island concept (4, 7, 10) and demonstrated its growing utility at the time of rapid expansion of sequence databases. Furthermore, the computational approach implemented in this work provided for a substantial expansion of the range of the identified putative defense systems. Many of these previously unknown defense systems contain enzymatic activities as well as predicted sensor components that potentially could be engineered for novel biotechnology applications.

[0342] Despite similarities in domain architectures among some of the identified defense systems, their phage specificities differ significantly, emphasizing the importance of multiple defense mechanisms for the survival of prokaryotes in the arms race against viruses. These observations are compatible with the concept of distributed microbial immunity, according to which defense systems encoded in different genomes collectively protect microbial communities from the diverse viromes they confront (38). Additionally, several of the identified defense systems incorporate molecular functions from typically non-defense sources, highlighting the versatility of activities that are recruited for antiviral defense. These include the RADAR deaminase, nitrilases, and reverse transcriptases of different families, including retrons. The demonstration of defense functions for multiple RTs, which are generally associated with mobile genetic elements, is consistent with the ‘guns for hire’ paradigm whereby enzymes are shuttled between MGEs and defense systems during microbial evolution (8). Finally, most of these defense systems do not appear to be substantially enriched within prophages, suggesting that they are dedicated host defense genes, rather than virus superinfection exclusion modules (FIGS. 33A-33C and Methods).

[0343] The overall patchy pattern of phage specificity observed for the different defense systems was unexpected. In some cases, the same system exhibited widely varying levels of protection against similar phages; for instance, DRT type 3 offered full protection against phage T2 but no protection against phage T4, which is ˜98% identical to T2.

[0344] The range of domains contained within these systems indicates that they employ diverse biochemical activities. The identification of these defense systems, as well as others Applicants have predicted computationally, provides a foundation for mechanistic investigation.

[0345] The results described here have broad implications for understanding antiviral resistance and host-virus dynamics in natural populations of microbes, as well as for technological applications such as the development of anti-bacterial therapeutics, DNA and RNA editing, molecular detection, and targeted cell destruction.
[0346] 1. C. A. Suttle, Viruses: unlocking the greatest biodiversity on Earth. Genome 56, 542-544 (2013).
[0347] 2. A. G. Cobián Güemes et al., Viruses as Winners in the Game of Life. Annu Rev Virol 3, 197-214 (2016).
[0348] 3. F. Hille et al., The Biology of CRISPR-Cas: Backward and Forward. Cell 172, 1239-1259 (2018).
[0349] 4. S. Doron et al., Systematic discovery of antiphage defense systems in the microbial pangenome. Science 359, (2018).
[0350] 5. J. E. Samson, A. H. Magadan, M. Sabri, S. Moineau, Revenge of the phages: defeating bacterial defences. Nat Rev Microbiol 11, 675-687 (2013).
[0351] 6. J. Bondy-Denomy, A. Pawluk, K. L. Maxwell, A. R. Davidson, Bacteriophage genes that inactivate the CRISPR/Cas bacterial immune system. Nature 493, 429-432 (2013).
[0352] 7. K. S. Makarova, Y. I. Wolf, E. V. Koonin, Comparative genomics of defense systems in archaea and bacteria. Nucleic Acids Res 41, 4360-4377 (2013).
[0353] 8. E. V. Koonin, K. S. Makarova, Y. I. Wolf, M. Krupovic, Evolutionary entanglement of mobile genetic elements and host defence systems: guns for hire. Nat Rev Genet, (2019).
[0354] 9. G. Faure et al., CRISPR-Cas in mobile genetic elements: counter-defence and beyond. Nat Rev Microbiol 17, 513-525 (2019).
[0355] 10. K. S. Makarova, Y. I. Wolf, S. Snir, E. V. Koonin, Defense islands in bacterial and archaeal genomes and prediction of novel defense systems. J Bacteriol 193, 6039-6056 (2011).
[0356] 11. S. A. Shmakov, K. S. Makarova, Y. I. Wolf, K. V. Severinov, E. V. Koonin, Systematic prediction of genes functionally linked to CRISPR-Cas systems by gene neighborhood analysis. Proc Natl Acad Sci USA 115, E5307-E5316 (2018).
[0357] 12. S. A. Shmakov et al., Systematic prediction of functionally linked genes in bacterial and archaeal genomes. Nat Protoc 14, 3013-3031 (2019).
[0358] 13. J. Gordeeva et al., BREX system of Escherichia coli distinguishes self from non-self by methylation of a specific DNA site. Nucleic Acids Res 47, 253-265 (2019).
[0359] 14. T. Goldfarb et al., BREX is a novel phage resistance system widespread in microbial genomes. EMBO J 34, 169-183 (2015).
[0360] 15. R. Odegrip, A. S. Nilsson, E. Haggard-Ljungquist, Identification of a gene encoding a functional reverse transcriptase within a highly variable locus in the P2-like coliphages. J Bacteriol 188, 1643-1647 (2006).
[0361] 16. A. M. Burroughs, D. Zhang, D. E. Schïffer, L. M. Iyer, L. Aravind, Comparative genomic analyses reveal a vast, novel network of nucleotide-centric systems in biological conflicts, immunity and signaling. Nucleic Acids Res 43, 10633-10654 (2015).
[0362] 17. K. S. Makarova, L. Gao, F. Zhang, E. V. Koonin, Unexpected connections between type VI-B CRISPR-Cas systems, bacterial natural competence, ubiquitin signaling network and DNA modification through a distinct family of membrane proteins. FEMS Microbiol Lett 366, (2019).
[0363] 18. C. D. Rae, Y. Gordiyenko, V. Ramakrishnan, How a circularized tmRNA moves through the ribosome. Science 363, 740-744 (2019).
[0364] 19. S. Zimmerly, L. Wu, An Unexplored Diversity of Reverse Transcriptases in Bacteria. Microbiol Spectr 3, MDNA3-0058-2014 (2015).
[0365] 20. N. Toro, R. Nisa-Martinez, Comprehensive phylogenetic analysis of bacterial reverse transcriptases. PLoS One 9, e114083 (2014).
[0366] 21. K. K. Kojima, M. Kanehisa, Systematic survey for novel types of prokaryotic retroelements based on gene neighborhood and protein architecture. Mol Biol Evol 25, 1395-1404 (2008).
[0367] 22. D. M. Simon, S. Zimmerly, A diversity of uncharacterized reverse transcriptases in bacteria. Nucleic Acids Res 36, 7219-7229 (2008).
[0368] 23. H. C. Pace, C. Brenner, The nitrilase superfamily: classification, structure and function. Genome Biol 2, REVIEWS0001 (2001).
[0369] 24. A. J. Simon, A. D. Ellington, I. J. Finkelstein, Retrons and their applications in genome engineering. Nucleic Acids Res 47, 11007-11019 (2019).
[0370] 25. F. Farzadfard, T. K. Lu, Synthetic biology. Genomically encoded analog memory with precise in vivo DNA writing in living cell populations. Science 346, 1256272 (2014).
[0371] 26. B. C. Lampson et al., Reverse transcriptase in a clinical strain of Escherichia coli: production of branched RNA-linked msDNA. Science 243, 1033-1038 (1989).
[0372] 27. D. Lim, W. K. Maas, Reverse transcriptase-dependent synthesis of a covalently linked, branched DNA-RNA compound in E. coli B. Cell 56, 891-904 (1989).
[0373] 28. T. M. Lima, D. Lim, A novel retron that produces RNA-less msDNA in Escherichia coli using reverse transcriptase. Plasmid 38, 25-33 (1997).
[0374] 29. L. Aravind, D. D. Leipe, E. V. Koonin, Toprim—a conserved catalytic domain in type IA and II topoisomerases, DnaG-type primases, OLD family nucleases and RecR proteins. Nucleic Acids Res 26, 4205-4213 (1998).
[0375] 30. S. Horsefield et al., NAD. Science 365, 793-799 (2019).
[0376] 31. V. Anantharaman, L. M. Iyer, L. Aravind, Ter-dependent stress response systems: novel pathways related to metal sensing, production of a nucleoside-like metabolite, and DNA-processing. Mol Biosyst 8, 3142-3165 (2012).
[0377] 32. K. S. Makarova, Y. I. Wolf, J. van der Oost, E. V. Koonin, Prokaryotic homologs of Argonaute proteins are predicted to function as key components of a novel system of defense against mobile genetic elements. Biol Direct 4, 29 (2009).
[0378] 33. V. Anantharaman, K. S. Makarova, A. M. Burroughs, E. V. Koonin, L. Aravind, Comprehensive analysis of the HEPN superfamily: identification of novel roles in intra-genomic conflicts, defense, pathogenesis and RNA processing. Biol Direct 8, 15 (2013).
[0379] 34. L. Aravind, L. M. Iyer, D. D. Leipe, E. V. Koonin, A novel family of P-loop NTPases with an unusual phyletic distribution and transmembrane segments inserted within the NTPase domain. Genome Biol 5, R30 (2004).
[0380] 35. D. D. Leipe, E. V. Koonin, L. Aravind, STAND, a class of P-loop NTPases including animal and plant regulators of programmed cell death: multiple, complex domain architectures, unusual phyletic patterns, and evolution by horizontal gene transfer. J Mol Biol 343, 1-28 (2004).
[0381] 36. O. Danot, E. Marquenet, D. Vidal-Ingigliardi, E. Richet, Wheel of Life, Wheel of Death: A Mechanistic Insight into Signaling by STAND Proteins. Structure 17, 172-182 (2009).
[0382] 37. E. V. Koonin, L. Aravind, Origin and evolution of eukaryotic apoptosis: the bacterial connection. Cell Death Differ 9, 394-404 (2002).
[0383] 38. A. Bernheim, R. Sorek, The pan-immune system of bacteria: antiviral defence as a community resource. Nat Rev Microbiol 18, 113-119 (2020).
[0384] 39. D. Hyatt et al., Prodigal: prokaryotic gene recognition and translation initiation site identification. BMC Bioinformatics 11, 119 (2010).
[0385] 40. M. Punta et al., The Pfam protein families database. Nucleic Acids Res 40, D290-301 (2012).
[0386] 41. A. Marchler-Bauer et al., CDD/SPARCLE: functional classification of proteins via subfamily domain architectures. Nucleic Acids Res 45, D200-D203 (2017).
[0387] 42. M. Steinegger, J. Soding, MMseqs2 enables sensitive protein sequence searching for the analysis of massive data sets. Nat Biotechnol 35, 1026-1028 (2017).
[0388] 43. M. Steinegger, J. Soding, Clustering huge protein sequence sets in linear time. Nat Commun 9, 2542 (2018).
[0389] 44. R. J. Roberts, T. Vincze, J. Posfai, D. Macelis, REBASE—a database for DNA restriction and modification: enzymes, genes and genomes. Nucleic Acids Res 43, D298-299 (2015).
[0390] 45. D. Cohen et al., Cyclic GMP-AMP signalling protects bacteria against viral infection. Nature, (2019).
[0391] 46. G. Ofir et al., DISARM is a widespread bacterial defence system with broad anti-phage activities. Nat Microbiol 3, 90-98 (2018).
[0392] 47. K. Katoh, K. Misawa, K. Kuma, T. Miyata, MAFFT: a novel method for rapid multiple sequence alignment based on fast Fourier transform. Nucleic Acids Res 30, 3059-3066 (2002).
[0393] 48. L. Zimmermann et al., A Completely Reimplemented MPI Bioinformatics Toolkit with a New HHpred Server at its Core. J Mol Biol 430, 2237-2243 (2018).
[0394] 49. J. C. Petricciani, F. C. Chu, J. B. Johnson, H. M. Meyer, Bacteriophages in live virus vaccines. Proc Soc Exp Biol Med 144, 789-792 (1973).
[0395] 50. J. B. Milstien, J. R. Walker, J. C. Petricciani, Bacteriophages in live virus vaccines: lack of evidence for effects on the genome of rhesus monkeys. Science 197, 469-470 (1977).
[0396] 51. B. Xu, X. Ma, H. Xiong, Y. Li, Complete genome sequence of 285P, a novel T7-like polyvalent E. coli bacteriophage. Virus Genes 48, 528-533 (2014).
[0397] 52. S. Picelli et al., Tn5 transposase and tagmentation procedures for massively scaled sequencing projects. Genome Res 24, 2033-2040 (2014).
[0398] 53. E. S. Miller et al., Bacteriophage T4 genome. Microbiol Mol Biol Rev 67, 86-156 (2003).
[0399] 54. D. H. Turner, D. H. Mathews, NNDB: the nearest neighbor parameter database for predicting stability of nucleic acid secondary structure. Nucleic Acids Res 38, D280-282 (2010).
[0400] 55. Y. Zhou, Y. Liang, K. H. Lynch, J. J. Dennis, D. S. Wishart, PHAST: a fast phage search tool. Nucleic Acids Res 39, W347-352 (2011).
[0401] 56. D. Arndt et al., PHASTER: a better, faster version of the PHAST phage search tool. Nucleic Acids Res 44, W16-21 (2016).
[0402] 57. J. Strecker et al., RNA-guided DNA insertion with CRISPR-associated transposases. Science 365, 48-53 (2019).
[0403] 58. S. E. Klompe, P. L. H. Vo, T. S. Halpin-Healy, S. H. Sternberg, Transposon-encoded CRISPR-Cas systems direct RNA-guided DNA integration. Nature 571, 219-225 (2019).
[0404] 59. E. V. Koonin, K. S. Makarova, Y. I. Wolf, Evolutionary Genomics of Defense Systems in Archaea and Bacteria. Annu Rev Microbiol 71, 233-261 (2017).
[0405] 60. S. Yamamoto, K. Kiyokawa, K. Tanaka, K. Moriguchi, K. Suzuki, Novel toxin-antitoxin system composed of serine protease and AAA-ATPase homologues determines the high level of stability and incompatibility of the tumor-inducing plasmid pTiC58. J Bacteriol 191, 4656-4666 (2009).

[0406] Materials and Methods

[0407] Detection of known defense systems. All bacterial and archaeal genomes (n=174,080) were downloaded from Genbank (NCBI) in November 2018. For genomes where gene annotations were incomplete or missing, genes were predicted using Prodigal (39). Known defense-related protein domains were annotated using RPSBLAST version 2.8.1 and the set of position-specific scoring matrices curated from the NCBI Conserved Domain Database (CDD) (4, 10, 40, 41). To reduce the false positive rate, a multi-gene system containing a ubiquitous protein domain was required to include two or more of its component genes in close proximity. For example, the type I restriction-modification endonuclease hsdR was called as a defense gene only if the corresponding methylase (hsdM) or specificity protein (hsdS) was also encoded in the vicinity. Genes were predicted for known defense systems including HsdRMS, McrBC, BREX, Druantia, Zorya, Wadjet, Thoeris, Hachiman, Lamassu, Gabjia, Septu, Shedu, Kiwa, pAgo, and other RM systems. Toxin-antitoxin systems were excluded from the set of known systems due to their overall low enrichment within defense islands (FIGS. 21A-21D).

[0408] Candidate novel defense genes. All translated protein-coding sequences within either 10 kb or 10 ORFs of known defense systems (whichever was greater), including the components of the known defense systems themselves, were compiled into a preliminary list (8.7×10⁶ genes), which was expected to consist of both defense and non-defense genes. Highly similar sequences (at least 98% sequence identity and coverage) were discarded using the linclust option in MMseqs2 (42, 43) with parameters—min-seq-id 0.98-c 0.98, resulting in a reduced list of 2.5×10⁶ sequences. These sequences were then further clustered using the cascaded clustering option in MMSeqs2, yielding a final list of 6.0×10⁵ representatives (“seeds”).

[0409] Scoring candidate genes for defense enrichment. For each of the 6.0×10⁵ seeds, a “defense enrichment score” was computed as (number of homologs in proximity to one or more known defense systems)/(total number of homologs). A gene was considered to be located in proximity to a known defense system if it occurred no more than 5 kb or 5 ORFs away from the locus encoding that system. CRISPR-Cas systems were omitted from the defense score calculation due to their low defense island association (10). Candidate sequences with a defense enrichment score of 0.1 or higher were retained for subsequent analysis, with the exception of predicted mobilome components (such as transposons), which were discarded. This cut-off was chosen because more than 90% of the known defense genes scored higher than this value, whereas most mobilome, toxin-antitoxin, and other non-defense genes scored lower (FIGS. 16B, 21A-21D). To identify homologs of the candidate proteins, all 6.2×10⁸ proteins in Genbank were tabulated, and highly similar proteins (at least 98% sequence identity and coverage) were removed, resulting in a reduced list of 1.3×10⁸ proteins. Each seed sequence was then searched against this non-redundant protein sequence database using MMseqs2. To qualify as evidence of homology, the resulting alignments were required to have a minimum coverage of 70% and a maximum E value of 10⁻⁵ (parameters—coy-mode 0-c 0.7-e 0.00001). The set of identified homologs was further clustered at 90% sequence identity to perform stringent redundancy reduction. In order to accurately compute defense association frequencies, seeds with fewer than 50 homologs after redundancy reduction were discarded.

[0410] Filtering defense-enriched genes based on context diversity. To select for genes that are likely to encode components of independent defense modules, defense-enriched seeds were further required to have sufficient context diversity. For each seed, the number of homologs within 5 kb or 5 ORFs of different defense system categories was counted, and the seed was retained if the entropy of this list, defined as Σ−pᵢln pᵢ, where pᵢ is the normalized frequency of category i, was at least 0.9. This value corresponds to halfway between 2 and 3 non-zero entries in the case of a uniformly distributed frequency vector. Seeds were further filtered based on the proportion of homologs next to predicted toxin-antitoxin/Abi, mobilome, and CRISPR-Cas genes (FIGS. 21A-21D).

[0411] Refining the classification of putative defense genes. A total of 12,027 seeds passing filter was identified, consisting of both known and putative defense genes. To determine whether each gene was putative or known, the original classification was refined as follows. A list was compiled of the amino acid sequences of reported homologs of known systems, including 288,776 restriction-modification proteins from REBASE (44); 517 proteins for BREX (14); and 27,775 proteins for other recently-identified systems (4, 45, 46). This list was supplemented with additional curated homologs and, following redundancy reduction, searched against the putative defense seeds using MMseqs2. Seeds that matched one or more of these known defense genes (at least 70-80% coverage with a maximum E value of 10⁻⁵) were labeled as known. A subset of labels were adjusted by an additional round of manual curation, resulting in a classification of 4,555 known and 7,472 putative defense genes.

[0412] Domain analysis of predicted defense genes. The 7,472 putative defense seeds were further analyzed with additional, more sensitive methods to assess their domain content. For each seed gene, a multiple sequence alignment (MSA) of its homologs was created using MAFFT (47). If the number of homologs was 1,000 or fewer, all homologs were included in the alignment; otherwise, 1,000 homologs were randomly selected for inclusion. MSAs were searched against the Pfam 32.0 database using HHpred (48), and domain predictions with at least 80% probability were retained. Of these 7,472 genes, 3,029 (41%) contained at least one pfam domain that has been reported to be defense-associated (4, 10, 45). Although some of these 3,029 proteins could be distant homologs of known defense proteins, many were included in this category because they contained ubiquitous pfam domains that are also employed by some known defense systems (in particular, AAA-family ATPases, helix-turn-helix (HTH) motifs, and (P)D−(D/E)×K-family nucleases); these are predicted to be uncharacterized defense genes. The remaining 59% either had no domain hits or contained only domains that were not in the set of defense-associated pfams.

[0413] From genes to defense systems. For each selected candidate defense protein, the gene neighborhoods of 30 homologs in proximity to known defense genes were randomly chosen and examined to identify conserved (predicted) operons that contained the seed and could be expected to constitute a minimal, intact defense system. Protein domains were predicted using HHpred, and the resulting prediction was used to infer the potential involvement of the respective proteins in the activity of the respective predicted defense system.

[0414] Estimation of defense system abundance. To estimate the abundance of each validated defense system in microbial genomes, Applicants downloaded n=205,214 genomes available in Genbank as of August 2019. For each defense system, initial protein sequence seeds encoded by the corresponding signature genes were taken from experimentally validated loci. Initial seeds were aligned and converted into HMM profiles. Applicants then used a constrained 2 iteration HMM profile search to generate highly specific HMM profiles and retrieve related systems as follows. Each ORF of size 150aa or greater, with one or more hits, was searched against all MINI profiles using HMMER3.1 and assigned to the profile that had the highest scoring match. For each system, ORFs with profile hits with less than 500 bp of intergenic distance on the same strand were grouped into candidate loci. For multi-protein systems, a putative locus was considered a hit if every signature gene profile for the system had a match in the locus with a bit score of at least 25. For single gene systems, a locus was considered a hit if the protein had a match to the system's single signature gene profile with a bit score of at least 50 and an alignment coverage of at least 70%. Signature proteins from the identified systems were separately clustered at 50% identity using MMseqs2 and subsequently aligned using MAFFT. The alignments were used to create a new set of signature gene profiles as input to the next iteration. For BREX and Type I RM, Applicants used preexisting pfam profiles for the signature genes in place of iterative MINI profile searching. The final abundance was calculated as the number of hits for the given system divided by the number of genomes (n).

[0415] Bacteria and phage strains. Phages T2, T3, T4, T5, T7, P1, λ, φV-1, M13, φX174, MS2, and Qβ, as well as host E. coli strains K-12 (ATCC25404) and C (ATCC13706), were obtained from the American Type Culture Collection (ATCC). The genome of phage φV-1, originally isolated from a measles vaccine (49, 50), was sequenced and found to be 92% similar to enterobacteria phage 285P, a T7-like phage (51).

[0416] Cloning. To facilitate experimental validation using coliphages, the source organism of each candidate defense system was chosen to be as phylogenetically similar as possible to E. coli, in particular, from other strains of E. coli whenever possible. Candidate defense systems were cloned into the low-copy plasmid pACYC184. When possible, genomic DNA from source organisms was obtained from ATCC, NCTC, or DSMZ, and the genes of interest were amplified with Q5 (New England Biolabs) or Phusion Flash (Thermo Scientific) polymerase, using primers with 5′ ends homologous to the ends of the plasmid backbone. Plasmids were assembled using the NEBuilder HiFi DNA Assembly mix (New England Biolabs). When the source organism was not readily available from public culture collections, genes were chemically synthesized (GenScript). When possible, the native promoter was retained. For source organisms outside of Enterobacteriaceae, or when the candidate system was operonized with other upstream genes, the system was placed under a bla or lac promoter.

[0417] Sequence verification of plasmids. The full sequences of all plasmids were verified by high-throughput sequencing. To prepare sequencing libraries, 25-50 ng of each plasmid was mixed with purified Tn5 transposome loaded with Illumina adapters and incubated at 55° C. for 10 min in the presence of 5 mM MgCl2 and 10 mM TAPS buffer (52). The quantity of Tn5 was titrated to generate an average fragment size of ˜100-400 bp. Tagmentation reactions were subsequently treated with 0.5 volumes of 0.1% sodium dodecyl sulfate for 5 min at room temperature and amplified with KAPA HiFi HotStart polymerase using primers containing 8 nt i7 and i5 index barcodes. Barcoded amplicons were sequenced on a MiSeq (Illumina) with at least 150 cycles for the forward read. Reads were aligned to the reference plasmid sequence by the Geneious read mapper, and error-free plasmids were retained for subsequent experiments.

[0418] Competent cell production. E. coli strains K-12 and C were cultured in ZymoBroth with 25 μg/mL chloramphenicol and made competent using Mix & Go buffers (Zymo) according to the manufacturer's recommended protocol.

[0419] Phage plaque assays. E. coli host strains were grown to saturation at 37° C. in Luria Broth (LB). To 10 mL top agar (10 g/L tryptone, 5 g/L yeast extract, 10 g/L NaCl, 7 g/L agar) was added chloramphenicol (final concentration 25 μg/mL) and 526 μL E. coli culture, and the mixture was poured on 10 cm LB-agar plates containing 25 μg/mL chloramphenicol. For phages T2, T4, T5, P1, λ, M13, MS2, and Qβ, dilutions of phage in phosphate buffered saline were spotted on the plates, and plaque counts were recorded after overnight incubation at 37° C. If individual plaques were too small to be counted, the most concentrated dilution at which no plaque formation was visible was recorded as having a single plaque. For phages T3, T7, φV-1, and φX174, a total of 3 of phage containing 5×10⁶ virions was spotted, and the area of the zone of lysis was measured after incubation at 37° C. for 68 hr. A total of 2-4 technical replicates was collected for each infection condition. Initial screening of defense system candidates was performed in E. coli K-12 (ATCC25404), excluding phage φX174 due to its inability to infect E. coli K-12; systems with observed defense activity were further tested as described above.

[0420] Phage cultivation. Phages T2, T3, T4, T7, φV-1, M13, φX174, MS2, and Qβ were propagated in liquid culture. The host E. coli strain for each phage was grown to an OD600 of 0.2 -0.4 at 37° C. in LB and infected with a slab of top agar containing phage plaque from a previous lysis. Cultures were grown overnight at 37° C. with 250 rpm agitation. Phages T5, P1, and λ were propagated by the double agar overlay method; after overnight incubation at 37° C., plaques were scraped in LB. For both liquid culture and double agar overlay, phage samples were centrifuged to pellet cellular debris, and the supernatant was filtered through with a 0.22 μm sterile filter.

[0421] Phage genome sequencing. DNA from phage φV-1 was isolated using QuickExtract DNA extraction solution (Epicentre) following the manufacturer's recommended protocol. After tagmentation and PCR amplification steps described earlier for plasmid sequence verification, the library was sequenced on a MiSeq with 200 cycles for the forward read and 110 cycles for the reverse read. Trimmed reads were assembled into contigs with SPAdes 3.13.0 using the—careful option, and contigs were subsequently scaffolded into a full genome using the genome sequence of enterobacteria phage 285P (51) as a reference.

[0422] Whole transcriptome sequencing. E. coli ATCC25404, containing either an empty vector or the candidate defense system, was grown to log phase in LB and diluted to an OD600 of 0.2. The culture was then split into two tubes, one of which was infected with phage T2 at an estimated MOI of 2. Both subcultures were incubated at 37° C. for 1 hr with 250 rpm agitation. RNA was extracted using TRIzol Reagent (Thermo Fisher Scientific) and treated with DNAse I, followed by a RiboMinus ribosomal RNA depletion kit (Thermo). Sequencing libraries were prepared using NEB Ultra II directional RNAseq library prep kit (New England Biolabs) and paired-end sequenced (2×75 cycles) with a NextSeq (Illumina). Adapter sequences were trimmed from sequencing reads using CutAdapt (with parameters—trim-n-q 20-m 20-a AGATCGGAAGAGC-A AGATCGGAAGAGC (SEQ ID NO: 472)), and trimmed reads were aligned to the E. coli MG1655 reference genome using the Geneious read mapper.

[0423] Phage fragmentation. Phage fragments were amplified from the genome of phage T2 by PCR, cloned into an ampicillin-resistant plasmid after an IPTG-inducible T7 promoter, and sequenced verified as previously described. Each fragment was then transformed into NovaBlue(DE3) E. coli expressing the Citrobacter rodentium RADAR system. Independent colonies for each fragments were grown to saturation at 37° C. in LB with 25 μg/mL chloramphenicol and 100 μg/mL ampicillin. Cultures were then diluted 1 to 5 in the same media, and IPTG was added to a final concentration of 0.5 mM. After 4 h growth at 37° C., cells were pelleted by centrifugation, and total RNA was extracted by a Direct-zol RNA purification kit (Zymo). The E. coli tmRNA was subsequently amplified by RT-PCR (QuantBio) and sequenced with a MiSeq (Illumina).

[0424] E. coli growth kinetics. Cells were grown to log phase in LB and diluted to an OD600 of 0.2. Cultures were infected with phage T2 at varying MOI at grown at 37° C., and the OD600 was measured every 2 min for a total duration of 4 hr on a Synergy Neo2 plate reader (BioTek).

[0425] Classification of phage genes. Phage T2 genes were classified as putative early, middle, or late genes based on the closest promoter on the same strand, as annotated based on the genome of phage T4 (53). Genes that could not be unambiguously classified were labeled as unknown.

[0426] RNA secondary structure prediction. Minimum free energy RNA secondary structures were predicted using the Turner (2004) energy parameters at 37° C. (54).

[0427] Prophage analysis. Prophage and phage DNA sequences were downloaded from PHASTER (55, 56). All clusters (seed gene plus identified homologs) with hits matching the experimentally validated systems, as well as one cluster matching the rexA gene of phage lambda as a positive control, were searched against the PHASTER database with tblastn for near identical matches (≥95% identity). For each cluster, phage association frequency was calculated as the number of proteins in the cluster with unique matches to the PHASTER database divided by the total number of unique proteins in the cluster (number of proteins after clustering at 90% sequence identity). The cutoff for frequent phage association of a system was defined as half of the frequency for rexA. Applicants note that PHASTER does not predict all instances of prophages and prophage remnants, and Applicants have also considered an alternative approach of identifying prophage association based on proximity to integrases, which may allow a greater number of prophages to be identified. However, a challenge with the latter approach is that defense islands often appear to derive from mobile genetic elements other than prophages and contain many integrases that originate from non-phage sources (e.g., CRISPR-associated transposases (57, 58)), leading to a high rate of false positives. The use of PHASTER provided the advantage of substantially reducing the false positives that would otherwise be expected for an approach based on integrase association.

[0428] Computational analysis of the RT (UG1) nitrilase domain. Homologs of the RT (UG1) defense gene were identified with a PSIBLAST search seeded on the experimentally validated sequence (WP_115196278.1), and highly similar homologs (≥90% identity) were removed. An MSA of the nitrilase domain was then created using MAFFT, and a custom position-specific scoring matrix (PSSM) was derived from this alignment. Bacterial and archaeal proteins in Genbank (redundancy-reduced at 98% sequence identity and coverage) were then searched against this profile with RPSBLAST, and the E-values of proteins with a match covering a minimum of 20% of the length of the profile were recorded. Known nitrilase enzymes were identified using a separate RPSBLAST search against the same set of Genbank proteins using 36 PSSMs from the CDD database (E-value≤10⁻⁶; minimum 40% profile coverage): cd07197, cd07564, cd07565, cd07566, cd07567, cd07568, cd07569, cd07570, cd07571, cd07572, cd07573, cd07574, cd07575, cd07576, cd07577, cd07578, cd07579, cd07580, cd07581, cd07582, cd07583, cd07584, cd07585, cd07586, cd07587, COG0388, pfam00795, PLN02504, PLN02747, PLN02798, PRK10438, PRK13286, PRK13825, TIGR00546, TIGR03381, and TIGR04048.

[0429] Establishing an abi response. Abortive infection (abi) systems, which are based on altruistic cell suicide or dormancy (59), typically induce non-specific or deleterious biochemical activity targeting the host cell that also interferes with the phage reproduction cycle. Abi responses can be characterized through traditional assays such as efficiency of the center of infection (ECOI), adsorption, host survival, and one-step growth curve measurements. However, because the events of phage DNA injection and expression of toxic early genes are likely to be deleterious to an infected cell even if the production of progeny phages is ultimately suppressed, these assays may not be informative in terms of distinguishing between abi vs. non-abi mechanisms. An alternative approach to establishing the existence of an abi response is to identify the biochemical activity of the defense system, which Applicants have focused on for the RADAR system.

[0430] Gene knockouts vs. heterologous reconstitution. To further assess the feasibility of performing knockout experiments in the source bacterial strains for each defense system, Applicants performed analyses which suggested that different defense systems with overlapping phage specificities often co-occur. For instance, E. coli strain DSM5212 contains both BREX type I and Druantia type I (FIG. 2D), both of which were included as positive controls; if BREX were to be knocked out in this strain, the presence of Druantia would likely ensure that its phage resistance profile across the 12 phages in Applicants' assay would remain unchanged. Similarly, the SIR2+HerA system from E. coli strain NCTC11129 primarily confers resistance to phage lambda (FIG. 2D); the source strain NCTC11129 additionally contains BREX type I, which also confers resistance against phage lambda. Collectively, these observations suggested that the knockout of a single defense system may not be sufficient to make its corresponding source strain phage-sensitive, motivating the use of heterologous reconstitution as the primary assay for defense activity.

TABLE 9
List of validated defense systems and their domain architectures.

| # | WT | Mutants | Type | Name | Domain Architecture* |
|---|---|---|---|---|---|
| 1 | FIG. 17D | FIG. 19B | Retron | Retron-TIR | RT_etron-TIR |
| 2 | FIG. 17D | FIG. 19B | Retron | Ec67 | RT_retron-TOPRIM |
| 3 | FIG. 17D | FIG. 19B | Retron | Ec86 | Nuc_deoxy + RT_retron |
| 4 | FIG. 17D | FIG. 29C | Retron | Ec78 | RT_retron + ATPase_AAA + HNH |
| 5 | FIG. 17D | FIG. 19B | RT | DRT type 1 | RT_UG1-nitrilase |
| 6 | FIG. 17D | FIG. 29A | RT | DRT type 2 | RT_UG2 |
| 7 | FIG. 17D | FIG. 19B | RT | DRT type 3 | RT_UG3 + RT_UG8 |
| 8 | FIG. 17D | FIG. 29B | RT | DRT type 4 | RT_UG15 |
| 9 | FIG. 17D | FIG. 19B | RT | DRT type 5 | RT_UG16 |
| 10.A | FIG. 17D | FIG. 18B | RNA | RADAR | ATPase_AAA + ADA |
| 10.B | FIG. 18B | FIG. 18B | RNA | RADAR | ATPase_AAA + ADA |
| 11 | FIG. 17D | FIG. 20 | RNA | apeA | RNase_ApeA |
| 12 | FIG. 17D | FIG. 20 | STAND | AVAST type 1 | MBL + Protease_S1-ATPase_STAND |
| 13 | FIG. 17D | FIG. 20 | STAND | AVAST type 2 | ATPase_STAND |
| 14 | FIG. 17D | FIG. 20 | STAND | AVAST type 3 | Nuclease_DUF4297-ATPase_STAND |
| 15 | FIG. 17D | FIG. 20 | STAND | AVAST type 4 | Nuclease_Mrr-ATPase_STAND |
| 16 | FIG. 17D | FIG. 20 | STAND | AVAST type 5 | SIR2-ATPase_STAND |
| 17 | FIG. 17D | FIG. 20 | Other | dsr1 | SIR2-DUF4020 |
| 18 | FIG. 17D | FIG. 20 | Other | dsr2 | SIR2 |
| 19 | FIG. 17D | FIG. 20 | Other | SIR2 + HerA | SIR2 + Helicase_HerA |
| 20 | FIG. 17D | FIG. 20 | Other | DUF4297 + | Nuclease_DUF4297 + Helicase_HerA |
| | | | | HerA | |
| 21 | FIG. 17D | FIG. 20 | Other | tmn | ATPase_AAA_TM |
| 22 | FIG. 17D | FIG. 20 | Other | qatABCD | ATPase_AAA + QueC + DNase_TatD |
| 23 | FIG. 17D | FIG. 20 | Other | hhe | HEPN_DUF4011-Helicase_SF1_Dna2- |
| | | | | | Nuclease_Vsr-DUF3320 |
| 24 | FIG. 17D | — | Other | mzaABCDE | Ankyrin-sigma + ATPase_MutL + |
| | | | | | ATPase_AAA-Z1 + |
| | | | | | Nuclease_DUF4420 + AIPR |
| 25 | FIG. 17D | FIG. 20 | Other | TerY-P | vWA + phosphatase_PP2C + STK-OB |
| 26 | FIG. 17D | FIG. 20 | Other | upx | Nuclease_DUF1887 |
| 27 | FIG. 17D | FIG. 20 | Other | ppl | Phosphoesterase_PHP-ATPase_SMC |
| 28 | FIG. 17D | FIG. 20 | Other | ietAS** | ATPase_AAA + Protease_S8 |
| 29 | FIG. 17D | FIG. 20 | Other | Restriction- | ATPase_DUF499 + DUF3780 + |
| | | | | like system | Methylase_DUF1156 + Nuclease_PLD- |
| | | | | | Helicase_HepA |

*Dashes (-) indicated domain fusions and (+) represents separate proteins.
**ietAS is also a previously-described plasmid stabilization toxin-antitoxin system (60).

TABLE 10
Source organism strains of validated defense systems and controls.

| # | Source Organism | Strain | Promoter | Codon | Genes | bp |
|---|---|---|---|---|---|---|
| BREX | Escherichia coli | DSM5212 | Native | Native | 6 | 13703 |
| type I | | | | | | |
| Druantia | Escherichia coli | DSM5212 | Native | Native | 5 | 11823 |
| type I | | | | | | |
| RT-Abi-P2 | Escherichia coli | ECOR30 | Native | Native | 1 | 1921 |
| 1 | Shigella dysenteriae | NCTC2966 | Native | Native | 1 | 2064 |
| 2 | Escherichia coli | NCTC8623 | Native | Native | 1 | 2038 |
| 3 | Escherichia coli | BL21 | Native | Native | 2 | 2188 |
| 4 | Escherichia coli | ECONIH5 | Native | Native | 3 | 3551 |
| 5 | Klebsiella pneumoniae | NCTC9143 | Native | Native | 2 | 4451 |
| 6 | Salmonella enterica | NCTC8273 | Native | Native | 1 | 1780 |
| 7 | Escherichia coli | ECOR12 | Native | Native | 2 | 4995 |
| 8 | Escherichia coli | 21-C8-A | Native | Human | 1 | 1838 |
| 9 | Escherichia coli | KTE25 | Native | Native | 1 | 1608 |
| 10.A | Citrobacter rodentium | DBS100 | Native | Native | 2 | 5526 |
| 10.B | Pluralibacter gergoviae | ATCC33028 | Native | Native | 3 | 6689 |
| 11 | Escherichia coli | NCTC8008 | Native | Native | 1 | 1981 |
| 12 | Erwinia piriflorinigrans | CFBP5888 | bla | Native | 3 | 7246 |
| 13 | Escherichia coli | NCTC9087 | Native | Native | 1 | 5109 |
| 14 | Salmonella enterica | NCTC13175 | Native | Native | 2 | 7175 |
| 15 | Escherichia coli | NCTC11132 | Native | Native | 1 | 4964 |
| 16 | Escherichia coli | NCTC13384 | Native | Native | 1 | 3411 |
| 17 | Escherichia coli | NCTC9112 | Native | Native | 1 | 4212 |
| 18 | Cronobacter sakazakii | NCTC8155 | Native | Native | 1 | 4329 |
| 19 | Escherichia coli | NCTC11129 | Native | Native | 2 | 3308 |
| 20 | Escherichia coli | NCTC11131 | Native | Native | 2 | 3419 |
| 21 | Escherichia coli | ECOR25 | Native | Native | 1 | 4415 |
| 22 | Escherichia coli | NCTC9009 | Native | Native | 4 | 5408 |
| 23 | Escherichia coli | ATCC43886 | Native | Native | 1 | 5958 |
| 24 | Salmonella enterica | NCTC5773 | Native | Native | 5 | 9416 |
| 25 | Citrobacter gillenii | NCTC9094 | Native | Native | 3 | 3605 |
| 26 | Salmonella enterica | NCTC6026 | Native | Native | 1 | 4100 |
| 27 | Escherichia coli | NCTC8620 | Native | Native | 1 | 3066 |
| 28 | Escherichia coli | ECOR52 | Native | Native | 2 | 3676 |
| 29 | Escherichia coli | ECOR58 | Native | Native | 4 | 9809 |

TABLE 11
PCR primers used to amplify validated defense systems and controls.

| # | dfd | Sequence |
|---|---|---|
| BREX | Fwd | gctaacttacattaattgcgttgcgcaACAGCACCACGTTCATCTTCC |
| type I | | (SEQ ID NO: 14) |
| | Rev | ccaaggggttatgctagttattgcgGTTCATTAAAATAGTTACTACGTTAATTCACACCC |
| | | (SEQ ID NO: 215) |
| Druantia | Fwd | gctaacttacattaattgcgttgcgcaGGTGAACGTTTGGTTGATAGGG |
| type I | | (SEQ ID NO: 216) |
| | Rev | ccaaggggttatgctagttattgcgCTCAATGGGCATAATTTTACATTGTGC |
| | | (SEQ ID NO: 217) |
| RT-Abi- | Fwd | gctaacttacattaattgcgttgcgcaACATCCCGTCATCATGCCATC |
| P2 | | (SEQ ID NO: 218) |
| | Rev | ccaaggggttatgctagttattgcgCTCCTCGGAATAGAATGTTATGTTCG |
| | | (SEQ ID NO: 219) |
| 1 | Locus synthesized | |
| 2 | Fwd | gctaacttacattaattgcgttgcgcaCGCGCTATCACGTAAAATAGGC |
| | | (SEQ ID NO: 220) |
| | Rev | ccaaggggttatgctagttattgcgCGAAAAATCAGCCTTAGCGTTCATAAC |
| | | (SEQ ID NO: 221) |
| 3 | Fwd | gctaacttacattaattgcgttgcgcaGCTCATGTTATGCATGTGCATG |
| | | (SEQ ID NO: 222) |
| | Rev | ccaaggggttatgctagttattgcgATTAGGTCTTCGCTTTATTTAAAGGGTTC |
| | | (SEQ ID NO: 223) |
| 4 | Locus synthesized | |
| 5 | Fwd | gagctaacttacattaattgcgttgcgcaGTCCTTAAACACGACAAAACCTGTG |
| | | (SEQ ID NO: 224) |
| | Rev | cccaaggggttatgctagttattgcgCGCAATGTAACACCCACCC |
| | | (SEQ ID NO: 225) |
| 6 | Locus synthesized | |
| 7 | Fwd | gctaacttacattaattgcgttgcgcaTCTCAACTTCCCCAAATGTCCG |
| | | (SEQ ID NO: 226) |
| | Rev | cccaaggggttatgctagttattgcgTTAGCAAAATACGCCCACGAAGTC |
| | | (SEQ ID NO: 227) |
| 8 | Locus synthesized | |
| 9 | Locus synthesized | |
| 10.A | Fwd | gctaacttacattaattgcgttgcgcaGAGGATTTATGCACAAAATCCTGATGC |
| | | (SEQ ID NO: 228) |
| | Rev | ccaaggggttatgctagttattgcgGATTTAATCTGTTGTTCCGAACGG |
| | | (SEQ ID NO: 229) |
| 10.B | Fwd | gctaacttacattaattgcgttgcgcaTGTGGTTAGTTATCACAGCACTAACC |
| | | (SEQ ID NO: 230) |
| | Rev | ccaaggggttatgctagttattgcgGTGTATAAGAATCCGAGACCGAAC |
| | | (SEQ ID NO: 231) |
| 11 | Locus synthesized | |
| 12 | Fwd | ataaatgctcaataatattgaaaaaggaagagtATGGTAGCGATAAAAATGTATCCGGC |
| | | (SEQ ID NO: 232) |
| | Rev | cccaaggggttatgctagttattgcgTCAATCCGTAGCCTCTTCATTCTCG |
| | | (SEQ ID NO: 233) |
| 13 | Fwd | gctaacttacattaattgcgttgcgcaGGGATTTCCACCACCTCCC |
| | | (SEQ ID NO: 234) |
| | Rev | ccaaggggttatgctagttattgcgTGCATAGCAATGAAGATAAACGTG |
| | | (SEQ ID NO: 235) |
| 14 | Fwd | gctaacttacattaattgcgttgcgcaACAATTTTTTGCCATAAGACGCTTTC |
| | | (SEQ ID NO: 236) |
| | Rev | ccaaggggttatgctagttattgcgCATTAGGACTAGTAGAAAAGTCTTGGG |
| | | (SEQ ID NO: 237) |
| 15 | Fwd | gctaacttacattaattgcgttgcgcaGCGCAGCTGACAAAGATTGAC |
| | | (SEQ ID NO: 238) |
| | Rev | ccaaggggttatgctagttattgcgCGATAATAAAAAGGCTCCAATCCCTG |
| | | (SEQ ID NO: 239) |
| 16 | Fwd | gctaacttacattaattgcgttgcgcaACTAGCTAAGCAATAAGGGCG |
| | | (SEQ ID NO: 240) |
| | Rev | ccaaggggttatgctagttattgcgCAATCTCCGAGGTGGCCC |
| | | (SEQ ID NO: 241) |
| 17 | Fwd | gctaacttacattaattgcgttgcgcaTATTTTGCGTAGCTAGAACGCAATC |
| | | (SEQ ID NO: 242) |
| | Rev | ccaaggggttatgctagttattgcgTGGGTATTAGCTCATATCAGAACTAATACCC |
| | | (SEQ ID NO: 243) |
| 18 | Fwd | gctaacttacattaattgcgttgcgcaGTAAGACAAGGGTTGAGCAGGC |
| | | (SEQ ID NO: 244) |
| | Rev | ccaaggggttatgctagttattgcgCAATGGTGGGCTGATTAATTAGATGAG |
| | | (SEQ ID NO: 245) |
| 19 | Fwd | gctaacttacattaattgcgttgcgcaTAGCTATTGTGACTATGCTAACCATATG |
| | | (SEQ ID NO: 246) |
| | Rev | ccaaggggttatgctagttattgcgTTCAGTCTAAATACATACCTGTCGGG |
| | | (SEQ ID NO: 247) |
| 20 | Fwd | gctaacttacattaattgcgttgcgcaGTGCGCCTTATGTGATTACAACG |
| | | (SEQ ID NO: 248) |
| | Rev | ccaaggggttatgctagttattgcgCTCTCAGCCTAATGATTCCAGAATAG |
| | | (SEQ ID NO: 249) |
| 21 | Fwd | gctaacttacattaattgcgttgcgcaACCGTGCTGGCATGTTTTTAC |
| | | (SEQ ID NO: 250) |
| | Rev | ccaaggggttatgctagttattgcgAGGAAGATCCGTGACCAGGAG |
| | | (SEQ ID NO: 251) |
| 22 | Fwd | gctaacttacattaattgcgttgcgcaGAAATTATTTGGAATGGATGATGGCG |
| | | (SEQ ID NO: 252) |
| | Rev | ccaaggggttatgctagttattgcgACTTCTACCTCCCTTTAGAAAAGTTAATG |
| | | (SEQ ID NO: 253) |
| 23 | Fwd | gctaacttacattaattgcgttgcgcaCGGATTGAATCTGTTTATGAAATTTGGCTG |
| | | (SEQ ID NO: 254) |
| | Rev | ccaaggggttatgctagttattgcgCCGACAGTTGTCACTGTTCTTATTACC |
| | | (SEQ ID NO: 255) |
| 24 | Fwd | tgagctaacttacattaattgcgttgcgcaATGATGAAGATCACCTAAAATGATAGGTTG |
| | | (SEQ ID NO: 256) |
| | Rev | cccaaggggttatgctagttattgcgCAGCTGTTAATTGTATATTGATGCGATGC |
| | | (SEQ ID NO: 257) |
| 25 | Fwd | gctaacttacattaattgcgttgcgcaCGTGATGAATGAAGCGGCTAAATAC |
| | | (SEQ ID NO: 258) |
| | Rev | ccaaggggttatgctagttattgcgGTAAATCCTCGGGAAAACACAGG |
| | | (SEQ ID NO: 259) |
| 26 | Fwd | gctaacttacattaattgcgttgcgcaGGGCTGTTTGGTTGAATTAAAAATACG |
| | | (SEQ ID NO: 260) |
| | Rev | ccaaggggttatgctagttattgcgCCTTGATTTAAAACTATCAGTAGTAGGAACG |
| | | (SEQ ID NO: 261) |
| 27 | Fwd | gctaacttacattaattgcgttgcgcaGATGGACTGGTACTGTAGATTCACC |
| | | (SEQ ID NO: 262) |
| | Rev | ccaaggggttatgctagttattgcgCAAAGACGCAGAGGCCATCAG |
| | | (SEQ ID NO: 263) |
| 28 | Fwd | gctaacttacattaattgcgttgcgcaATAGAACGATGAAGGATGGAAGCTAC |
| | | (SEQ ID NO: 264) |
| | Rev | ccaaggggttatgctagttattgcgTTGTATTTTGTTGTGTATGGGCGG |
| | | (SEQ ID NO: 265) |
| 29 | Fwd | gctaacttacattaattgcgttgcgcaCGTGATTCAGTTCGCCAGAC |
| | | (SEQ ID NO: 266) |
| | Rev | ccaaggggttatgctagttattgcgCACTCGAAATGGATACCCTGAG |
| | | (SEQ ID NO: 267) |

TABLE 12
Protein accession numbers of defense system
components (proposed gene names underlined).

| # | Gene | Name | Protein Accession |
|---|---|---|---|
| BREX | A | brxA | WP_085962535.1* |
| type I | B | brxB | WP_000566901.1 |
| | C | brxC | WP_001019648.1 |
| | D | pglX | WP_021524842.1 |
| | E | pglZ | WP_001180895.1 |
| | F | brxL | WP_001193074.1 |
| Druantia | A | druA | WP_000549798.1 |
| type I | B | druB | WP_001315973.1 |
| | C | druC | WP_021520530.1 |
| | D | druD | WP_000455180.1 |
| | E | druE | WP_000608843.1 |
| RT-Abi-P2 | A | — | WP_047657908.1 |
| 1 | A | — | WP_005025120.1* |
| 2 | A | Ec67 | WP_000169432.1 |
| 3 | A | — | WP_001034589.1 |
| | B | Ec86 | WP_001320043.1 |
| 4 | A | Ec78 | WP_001549208.1 |
| | B | ptuA | WP_001549209.1 |
| | C | ptuB | WP_001549210.1 |
| 5 | A | drt1a | WP_115196278.1 |
| | B | drt1b | WP_040189938.1 |
| 6 | A | drt2 | WP_012737279.1 |
| 7 | A | drt3a | WP_087902017.1 |
| | B | drt3b | WP_062891751.1 |
| 8 | A | drt4 | GCK53192.1 |
| 9 | A | drt5 | WP_001524904.1 |
| 10.A | A | rdrA | WP_012906049.1 |
| | B | rdrB | WP_012906048.1 |
| 10.B | A | rdrA | WP_155731552.1 |
| | B | rdrB | WP_064360593.1 |
| | C | rdrD | WP_064360592.1 |
| 11 | A | apeA | WP_000706972.1 |
| 12 | A | avs1a | WP_023654314.1 |
| | B | avs1b | WP_084007836.1* |
| 12 | C | avs1c | WP_023654316.1 |
| 13 | A | avs2 | WP_063118745.1 |
| 14 | A | avs3a | WP_126523998.1 |
| | B | avs3b | WP_126523997.1* |
| 15 | A | avs4 | WP_044068927.1 |
| 16 | A | avs5 | WP_001515187.1 |
| 17 | A | dsr1 | WP_029488749.1 |
| 18 | A | dsr2 | WP_015387030.1* |
| 19 | A | — | WP_021577683.1 |
| | B | herA | WP_021577682.1 |
| 20 | A | — | WP_016239654.1 |
| | B | herA | WP_016239655.1 |
| 21 | A | tmn | WP_001683567.1 |
| 22 | A | qatA | STG85056.1 |
| | B | qatB | STG85057.1 |
| | C | qatC | STG85058.1 |
| | D | qatD | STG85059.1 |
| 23 | A | hhe | WP_032200272.1 |
| 24 | A | mzaA | VEA06816.1* |
| | B | mzaB | VEA06814.1 |
| | C | mzaC | VEA06812.1 |
| | D | mzaD | VEA06810.1 |
| | E | mzaE | VEA06808.1 |
| 25 | A | terY | WP_115257868.1 |
| | B | — | WP_115257869.1 |
| | C | — | WP_115257870.1 |
| 26 | A | upx | WP_060647174.1 |
| 27 | A | ppl | STM52149.1 |
| 28 | A | ietA | WP_000385105.1 |
| | B | ietS | WP_001551050.1 |
| 29 | A | — | WP_000860009.1 |
| | B | — | WP_001044652.1 |
| | C | — | WP_001207938.1 |
| | D | — | WP_000985714.1 |

*Probable error in annotated protein start position corrected.

TABLE 13
Predicted protein domains within validated defense systems and controls. Transmembrane
helices were predicted using TMHMM, and all other domains were predicted using HHpred.

| | | | | Representative | | | |
|---|---|---|---|---|---|---|---|
| ID | Gene | Residues | Domain | HHpred Hit | Probability | Start | End |
| BREX | A | 201 | DUF1819 | PF08849.11 | 100 | 6 | 189 |
| type I | B | 200 | DUF1788 | PF08747.11 | 100 | 65 | 187 |
| | C | 1213 | ATPase | PF07693.14 | 96.66 | 43 | 348 |
| | | | DUF499 | PF04465.12 | 99.88 | 247 | 846 |
| | D | 1201 | Methyltransferase | PF02384.16 | 99.7 | 210 | 622 |
| | E | 865 | PglZ | PF08665.12 | 99.12 | 474 | 650 |
| | F | 694 | Lon protease | PF13337.6 | 100 | 30 | 484 |
| | | | Lon protease | PF05362.13 | 99.9 | 486 | 693 |
| Druantia | A | 404 | DUF4338 | PF14236.6 | 99.92 | 45 | 339 |
| type I | B | 548 | CoiA | PF06054.11 | 99.77 | 1 | 182 |
| | C | 627 | Macoilin | PF09726.9 | 96.72 | 167 | 323 |
| | D | 347 | (none) | — | — | — | — |
| | E | 1836 | Helicase | PF00270.29 | 98.45 | 99 | 388 |
| | | | Helicase | 5V9X_A | 97.55 | 1071 | 1208 |
| | | | DUF1998 | PF09369.10 | 98.92 | 1626 | 1710 |
| RT-Abi-P2 | A | 515 | RT | PF00078.27 | 99.09 | 68 | 291 |
| 1 | A | 542 | RT | PF00078.27 | 99.43 | 105 | 309 |
| | | | TIR | PF13676.6 | 97.91 | 411 | 536 |
| 2 | A | 586 | RT | PF00078.27 | 99.45 | 48 | 262 |
| | | | TOPRIM | cd01026 | 96.88 | 367 | 465 |
| 3 | A | 307 | Nuc_deoxy | PF15891.5 | 96.04 | 29 | 128 |
| | B | 320 | RT | PF00078.27 | 99.52 | 53 | 248 |
| 4 | A | 311 | RT | PF00078.27 | 99.37 | 34 | 241 |
| | B | 550 | ATPase | PF13175.6 | 99.8 | 64 | 432 |
| | C | 216 | HNH | PF01844.23 | 97.57 | 43 | 85 |
| 5 | A | 1232 | RT | PF00078.27 | 99.06 | 80 | 382 |
| | | | Nitrilase | PF00795.22 | 98.89 | 953 | 1216 |
| | B | 144 | Transmembrane | — | — | 4 | 26 |
| 6 | A | 425 | RT | PF00078.27 | 99.63 | 54 | 328 |
| 7 | A | 398 | RT | PF00078.27 | 99.39 | 53 | 251 |
| | B | 667 | RT | PF00078.27 | 98.96 | 63 | 323 |
| 8 | A | 540 | RT | PF00078.27 | 99.12 | 67 | 296 |
| 9 | A | 494 | RT | PF00078.27 | 99.14 | 59 | 263 |
| 10.A | A | 851 | ATPase | PF07693.14 | 99.6 | 33 | 364 |
| | B | 856 | Adenosine | PF00962.22 | 99.52 | 166 | 831 |
| | | | deaminase | | | | |
| 10.B | A | 907 | ATPase | PF07693.14 | 99.48 | 29 | 349 |
| | B | 914 | Adenosine | PF00962.22 | 97.63 | 789 | 901 |
| | | | deaminase | | | | |
| | C | 245 | SLATT | PF18183.1 | 96.01 | 120 | 241 |
| | | | Transmembrane | — | — | 44 | 63 |
| | | | Transmembrane | — | — | 78 | 100 |
| | | | Transmembrane | — | — | 127 | 146 |
| | | | Transmembrane | — | — | 151 | 168 |
| 11 | A | 601 | HEPN | PF18739.1 | 86.57 | 507 | 532 |
| 12 | A | 386 | MBL-fold hydrolase | PF00753.27 | 98.79 | 8 | 324 |
| | B | 1935 | Protease | PF02122.15 | 98.23 | 2 | 187 |
| | | | ATPase | PF14516.6 | 99.36 | 204 | 535 |
| | C | 93 | (none) | — | — | — | — |
| 13 | A | 1484 | ATPase | PF14516.6 | 98.93 | 316 | 643 |
| 14 | A | 2092 | DUF4297 | PF14130.6 | 98.41 | 8 | 223 |
| | | | ATPase | PF14516.6 | 99.44 | 250 | 597 |
| | B | 207 | (none) | — | — | — | — |
| 15 | A | 1587 | Mrr | PF13156.6 | 97.05 | 17 | 162 |
| | | | ATPase | PF14516.6 | 99.07 | 204 | 476 |
| 16 | A | 769 | SIR2 | cd00296 | 99.26 | 22 | 244 |
| | | | ATPase | PF14516.6 | 97.6 | 312 | 464 |
| 17 | A | 1275 | SIR2 | cd00296 | 99.44 | 21 | 253 |
| | | | DUF4020 | PF13212.6 | 98.39 | 1114 | 1268 |
| 18 | A | 1207 | SIR2 | cd00296 | 99.47 | 21 | 240 |
| 19 | A | 415 | SIR2 | cd00296 | 99.59 | 26 | 338 |
| | B | 610 | HerA helicase | 4D2I_B | 100 | 10 | 608 |
| 20 | A | 394 | DUF4297 | PF14130.6 | 99.05 | 1 | 191 |
| | B | 571 | HerA helicase | 4D2I_B | 100 | 7 | 568 |
| 21 | A | 1273 | ATPase | PF07693.14 | 97.62 | 39 | 390 |
| | | | Transmembrane | — | — | 160 | 177 |
| | | | Transmembrane | — | — | 199 | 218 |
| 22 | A | 643 | ATPase | PF07693.14 | 99.8 | 15 | 385 |
| | B | 274 | (none) | — | — | — | — |
| | C | 457 | QueC | PF06508.13 | 99.67 | 150 | 369 |
| | D | 263 | TatD DNase | PF01026.21 | 99.94 | 13 | 254 |
| 23 | A | 1911 | DUF4011 | PF13195.6 | 99.81 | 33 | 308 |
| | | | ATPase | PF13086.6 | 97.93 | 427 | 552 |
| | | | Helicase | PF01443.18 | 97.82 | 1379 | 1636 |
| | | | Endonuclease | PF18741.1 | 98.7 | 1683 | 1780 |
| | | | DUF3320 | PF11784.8 | 98.1 | 1841 | 1885 |
| 24 | A | 679 | Ankyrin repeat | COG0666 | 99.52 | 10 | 188 |
| | | | Sigma | COG1191 | 99.81 | 411 | 657 |
| | B | 500 | MutL | COG0323 | 99.81 | 1 | 352 |
| | C | 952 | ATPase | PF13872.6 | 97.51 | 117 | 349 |
| | | | Z1 | PF10593.9 | 100 | 437 | 672 |
| | D | 342 | DUF4420 | PF14390.6 | 100 | 9 | 317 |
| | E | 601 | AIPR | PF10592.9 | 100 | 245 | 562 |
| 25 | A | 277 | vWA | PF00092.28 | 98.93 | 14 | 203 |
| | B | 239 | Phosphatase | PF00481.21 | 99.74 | 5 | 232 |
| | C | 561 | Kinase | PF00069.25 | 100 | 34 | 296 |
| | | | ssDNA-binding | PF01336.25 | 96.18 | 344 | 435 |
| 26 | A | 1272 | DUF1887 | PF09002.11 | 92.5 | 1105 | 1272 |
| 27 | A | 891 | PHP | cd07436 | 99.36 | 4 | 238 |
| | | | ATPase | PF13166.6 | 99.74 | 266 | 836 |
| 28 | A | 384 | ATPase | PF13654.6 | 97.36 | 5 | 349 |
| | B | 754 | Protease | PF00082.22 | 99.87 | 264 | 561 |
| 29 | A | 1022 | ATPase | PF07693.14 | 96.47 | 49 | 312 |
| | | | DUF499 | PF04465.12 | 100 | 79 | 745 |
| | B | 195 | DUF3780 | PF12635.7 | 100 | 1 | 187 |
| | C | 945 | DUF1156 | PF06634.12 | 99 | 18 | 81 |
| | | | Methyltransferase | PF01555.18 | 96.08 | 150 | 202 |
| | | | Methyltransferase | PF01555.18 | 97.76 | 548 | 682 |
| | D | 907 | PLD | cd09179 | 99.17 | 4 | 177 |
| | | | Helicase | 6BOG_B | 100 | 218 | 865 |

TABLE 14
Sequence of vector backbone. Inserts were cloned
between the HindIII and EcoRI
restriction sites (underlined).

CCCGCGCCCACCGGAAGGAGCTGACTGGGTTGAAGGCTCTCAAGGGCATC
GGTCGAGATCCCGGTGCCTAATGAGTGAGCTAACTTACATTAATTGCGTT
GCGCAAGCTTCTGCAGAATTCGCAATAACTAGCATAACCCCTTGGGGCCT
CTAAACGGGTCTTGAGGGGTTTTTTGCTGAAACCTCAGGCATTTGAGAAG
CACACGGTCACACTGCTTCCGGTAGTCAATAAACCGGTAAACCAGCAATA
GACATAAGCGGCTATTTAACGACCCTGCCCTGAACCGACGACCGGGTCGA
ATTTGCTTTCGAATTTCTGCCATTCATCCGCTTATTATCACTTATTCAGG
CGTAGCACCAGGCGTTTAAGGGCACCAATAACTGCCTTAAAAAAATTACG
CCCCGCCCTGCCACTCATCGCAATACTGTTGTAATTCATTTAACATTCTG
CCGACATGGAAGCCATCACAGACGGCATGATGAACCTGAATCGCCAGCGG
CATCAGCACCTTGTCGCCTTGCGTATAATATTTGCCCATAGTGAAAACGG
GGGCGAAGAAGTTGTCCATATTGGCCACGTTTAAATCAAAACTGGTGAAA
CTCACCCAGGGATTGGCTGAGACGAAAAACATATTCTCAATAAACCCTTT
AGGGAAATAGGCCAGGTTTTCACCGTAACACGCCACATCTTGCGAATATA
TGTGTAGAAACTGCCGGAAATCGTCGTGGTATTCACTCCAGAGCGATGAA
AACGTTTCAGTTTGCTCATGGAAAACGGTGTAACAAGGGTGAACACTATC
CCATATCACCAGCTCACCGTCTTTCATCGCCATACGGAACTCTGGATGAG
CATTCATCAGGCGGGCAAGAATGTGAATAAAGGCCGGATAAAACTTGTGC
TTATTTTTCTTTACGGTCTTTAAAAAGGCCGTAATATCCAGCTGAACGGT
CTGGTTATAGGTACATTGAGCAACTGACTGAAATGCCTCAAAATGTTCTT
TACGATGCCATTGGGATATATCAACGGTGGTATATCCAGTGATTTTTTTC
TCCATTTTAGCTTCCTTAGCTCCTGAAAATCTCGATAACTCAAAAAATAC
GCCCGGTAGTGATCTTATTTCATTATGGTGAAAGTTGGAACCTCTTACGT
GCCGATCAACGTCTCATTTTCGCCAAAAGTTGGCCCAGGGCTTCCCGGTA
TCAACAGGGACACCAGGATTTATTTATTCTGCGAAGTGATCTTCCGTCAC
AGGTATTTATTCGGCGCAAAGTGCGTCGGGTGATGCTGCCAACTTACTGA
TTTAGTGTATGATGGTGTTTTTGAGGTGCTCCAGTGGCTTCTGTTTCTAT
CAGCTGTCCCTCCTGTTCAGCTACTGACGGGGTGGTGCGTAACGGCAAAA
GCACCGCCGGACATCAGCGCTAGCGGAGTGTATACTGGCTTACTATGTTG
GCACTGATGAGGGTGTCAGTGAAGTGCTTCATGTGGCAGGAGAAAAAAGG
CTGCACCGGTGCGTCAGCAGAATATGTGATACAGGATATATTCCGCTTCC
TCGCTCACTGACTCGCTACGCTCGGTCGTTCGACTGCGGCGAGCGGAAAT
GGCTTACGAACGGGGCGGAGATTTCCTGGAAGATGCCAGGAAGATACTTA
ACAGGGAAGTGAGAGGGCCGCGGCAAAGCCGTTTTTCCATAGGCTCCGCC
CCCCTGACAAGCATCACGAAATCTGACGCTCAAATCAGTGGTGGCGAAAC
CCGACAGGACTATAAAGATACCAGGCGTTTCCCCCTGGCGGCTCCCTCGT
GCGCTCTCCTGTTCCTGCCTTTCGGTTTACCGGTGTCATTCCGCTGTTAT
GGCCGCGTTTGTCTCATTCCACGCCTGACACTCAGTTCCGGGTAGGCAGT
TCGCTCCAAGCTGGACTGTATGCACGAACCCCCCGTTCAGTCCGACCGCT
GCGCCTTATCCGGTAACTATCGTCTTGAGTCCAACCCGGAAAGACATGCA
AAAGCACCACTGGCAGCAGCCACTGGTAATTGATTTAGAGGAGTTAGTCT
TGAAGTCATGCGCCGGTTAAGGCTAAACTGAAAGGACAAGTTTTGGTGAC
TGCGCTCCTCCAAGCCAGTTACCTCGGTTCAAAGAGTTGGTAGCTCAGAG
AACCTTCGAAAAACCGCCCTGCAAGGCGGTTTTTTCGTTTTCAGAGCAAG
AGATTACGCGCAGACCAAAACGATCTCAAGAAGATCATCTTATTAATCAG
ATAAAATATTTCTAGATTTCAGTGCAATTTATCTCTTCAAATGTAGCACC
TGAAGTCAGCCCCATACGATATAAGTTGTAATTCTCATGTTAGTCATGC
(SEQ ID NO: 268)

TABLE 15-A
Sequences of validated defense systems (sequences shown in Tables 15-B and C)

| Row | | | | Source | | | | Gene | | |
|---|---|---|---|---|---|---|---|---|---|---|
| No. | # | Name | Description | Organism | Strain | bp | Gene | Name | Accession | Residues |
| 1 | Control | BREX type I | — | Escherichia coli | DSM5212 | 13703 | A | brxA | WP_085962535.1* | 201 |
| 2 | | | | | | | B | brxB | WP_000566901.1 | 200 |
| 3 | | | | | | | C | brxC | WP_001019648.1 | 1213 |
| 4 | | | | | | | D | pglX | WP_021524842.1 | 1201 |
| 5 | | | | | | | E | pglZ | WP_001180895.1 | 865 |
| 6 | | | | | | | F | brxL | WP_001193074.1 | 694 |
| 7 | Control | Druantia type I | — | Escherichia coli | DSM5212 | 11823 | A | druA | WP_000549798.1 | 404 |
| 8 | | | | | | | B | druB | WP_001315973.1 | 548 |
| 9 | | | | | | | C | druC | WP_021520530.1 | 627 |
| 10 | | | | | | | D | druD | WP_000455180.1 | 347 |
| 11 | | | | | | | E | druE | WP_000608843.1 | 1836 |
| 12 | Control | RT-Abi-P2 | — | Escherichia coli | ECOR30 | 1921 | A | | WP_047657908.1 | 515 |
| 13 | 1 | — | Retron-TIR | Shigella | NCTC2966 | 2064 | A | | WP_005025120.1* | 542 |
| | | | | dysenteriae | | | | | | |
| 14 | 2 | Ec67 | Retron-TOPRIM | Escherichia coli | NCTC8623 | 2038 | A | Ec67 | WP_000169432.1 | 586 |
| 15 | 3 | Ec86 | Nuc_deoxy + | Escherichia coli | BL21 | 2188 | A | | WP_001034589.1 | 307 |
| 16 | | | retron | | | | B | Ec86 | WP_001320043.1 | 320 |
| 17 | 4 | Ec78 | Retron + ATPase + | Escherichia coli | ECONIH5 | 3551 | A | Ec78 | WP_001549208.1 | 311 |
| 18 | | | HNH | | | | B | ptuA | WP_001549209.1 | 550 |
| 19 | | | | | | | C | ptuB | WP_001549210.1 | 216 |
| 20 | 5 | DRT type 1 | RT-nitrilase (UG1) | Klebsiella | NCTC9143 | 4451 | A | drt1a | WP_115196278.1 | 1232 |
| 21 | | | | pneumoniae | | | B | drt1b | WP_040189938.1 | 144 |
| 22 | 6 | DRT type 2 | RT (UG2) | Salmonella | NCTC8273 | 1780 | A | drt2 | WP_012737279.1 | 425 |
| | | | | enterica | | | | | | |
| 23 | 7 | DRT type 3 | RT (UG3) + RT | Escherichia coli | ECOR12 | 4995 | A | drt3a | WP_087902017.1 | 398 |
| 24 | | | (UG8) | | | | B | drt3b | WP_062891751.1 | 667 |
| 25 | 8 | DRT type 4 | RT (UG15) | Escherichia coli | 21-C8-A | 1838 | A | drt4 | GCK53192.1 | 540 |
| 26 | 9 | DRT type 5 | RT (UG16) | Escherichia coli | KTE25 | 1608 | A | drt5 | WP_001524904.1 | 494 |
| 27 | 10.A | RADAR | ATPase + | Citrobacter | DBS100 | 5526 | A | rdrA | WP_012906049.1 | 851 |
| 28 | | | deaminase | rodentium | | | B | rdrB | WP_012906048.1 | 856 |
| 29 | 10.B | RADAR | ATPase + | Pluralibacter | ATCC33028 | 6689 | A | rdrA | WP_155731552.1 | 907 |
| 30 | | | deaminase | gergoviae | | | B | rdrB | WP_064360593.1 | 914 |
| 31 | | | | | | | C | rdrD | WP_064360592.1 | 245 |
| 32 | 11 | apeA | ApeA (HEPN) | Escherichia coli | NCTC8008 | 1981 | A | apeA | WP_000706972.1 | 601 |
| 33 | 12 | AVAST | MBL + protease- | Erwinia | CFBP5888 | 7246 | A | avs1a | WP_023654314.1 | 386 |
| 34 | | type 1 | STAND | piriflorinigrans | | | B | avs1b | WP_084007836.1* | 1935 |
| 35 | | | | | | | C | avs1c | WP_023654316.1 | 93 |
| 36 | 13 | AVAST | STAND | Escherichia coli | NCTC9087 | 5109 | A | avs2 | WP_063118745.1 | 1484 |
| | | type 2 | | | | | | | | |
| 37 | 14 | AVAST | DUF4297-STAND | Salmonella | NCTC13175 | 7175 | A | avs3a | WP_126523998.1 | 2092 |
| 38 | | type 3 | | enterica | | | B | avs3b | WP_126523997.1* | 207 |
| 39 | 15 | AVAST | Mrr-STAND | Escherichia coli | NCTC11132 | 4964 | A | avs4 | WP_044068927.1 | 1587 |
| | | type 4 | | | | | | | | |
| 40 | 16 | AVAST | SIR2-STAND | Escherichia coli | NCTC13384 | 3411 | A | avs5 | WP_001515187.1 | 769 |
| | | type 5 | | | | | | | | |
| 41 | 17 | dsr1 | SIR2-DUF4020 | Escherichia coli | NCTC9112 | 4212 | A | dsr1 | WP_029488749.1 | 1275 |
| 42 | 18 | dsr2 | SIR2 | Cronobacter | NCTC8155 | 4329 | A | dsr2 | WP_015387030.1* | 1207 |
| | | | | sakazakii | | | | | | |
| 43 | 19 | — | SIR2 + HerA | Escherichia coli | NCTC11129 | 3308 | A | | WP_021577683.1 | 415 |
| 44 | | | | | | | B | herA | WP_021577682.1 | 610 |
| 45 | 20 | — | DUF4297 + HerA | Escherichia coli | NCTC11131 | 3419 | A | | WP_016239654.1 | 394 |
| 46 | | | | | | | B | herA | WP_016239655.1 | 571 |
| 47 | 21 | tmn | Transmembrane | Escherichia coli | ECOR25 | 4415 | A | tmn | WP_001683567.1 | 1273 |
| | | | ATPase | | | | | | | |
| 48 | 22 | qatABCD | ATPase + QueC + | Escherichia coli | NCTC9009 | 5408 | A | qatA | STG85056.1 | 643 |
| 49 | | | TatD | | | | B | qatB | STG85057.1 | 274 |
| 50 | | | | | | | C | qatC | STG85058.1 | 457 |
| 51 | | | | | | | D | qatD | STG85059.1 | 263 |
| 52 | 23 | hhe | DUF4011-helicase- | Escherichia coli | ATCC43886 | 5958 | A | hhe | WP_032200272.1 | 1911 |
| | | | Vsr | | | | | | | |
| 53 | 24 | mzaABCDE | MutL + Z1 + | Salmonella | NCTC5773 | 9416 | A | mzaA | VEA06816.1* | 679 |
| 54 | | | DUF + AIPR | enterica | | | B | mzaB | VEA06814.1 | 500 |
| 55 | | | | | | | C | mzaC | VEA06812.1 | 952 |
| 56 | | | | | | | D | mzaD | VEA06810.1 | 342 |
| 57 | | | | | | | E | mzaE | VEA06808.1 | 601 |
| 58 | 25 | TerY-P | vWA + PP2C + | Citrobacter | NCTC9094 | 3605 | A | terY | WP_115257868.1 | 277 |
| 59 | | | STK-OB | gillenii | | | B | | WP_115257869.1 | 239 |
| 60 | | | | | | | C | | WP_115257870.1 | 561 |
| 61 | 26 | upx | DUF1887 | Salmonella | NCTC6026 | 4100 | A | upx | WP_060647174.1 | 1272 |
| | | | | enterica | | | | | | |
| 62 | 27 | ppl | Phosphoesterase- | Escherichia coli | NCTC8620 | 3066 | A | ppl | STM52149.1 | 891 |
| | | | ATPase | | | | | | | |
| 63 | 28 | ietAS | ATPase + protease | Escherichia coli | ECOR52 | 3676 | A | ietA | WP_000385105.1 | 384 |
| 64 | | | | | | | B | ietS | WP_001551050.1 | 754 |
| 65 | 29 | — | Restriction-like | Escherichia coli | ECOR58 | 9809 | A | | WP_000860009.1 | 1022 |
| 66 | | | system | | | | B | | WP_001044652.1 | 195 |
| 67 | | | | | | | C | | WP_001207938.1 | 945 |
| 68 | | | | | | | D | | WP_000985714.1 | 907 |

*Probable error in annotated protein start position corrected.

TABLE 15-B
Sequences of validated defense systems
(Cloned sequences corresponding to row No. 1-68 in Table 15-A)

| Row No. | | Cloned Sequence |
|---|---|---|
| 1 | Control | acagcaccacgttcatcttccttttttaactgattttacagagactttaatacagttaaaatttta |
| 2 | | tttcctgagctgtaatcgattaagttgatgcatttaatgggaatgatatagggtcatttccagtct |
| 3 | | cacttatagaaatggctaaagcatgactctcgccaaaaccgtttatgtgttgtacataacgcgatc |
| 4 | | atccctctcacaaattgccttttctcatggcatctcgcccggtcccccattacaatcactttttgt |
| 5 | | tttttgcgagctgcattccagtcttcagagggtttttcgatgattaaaaatgacaaggcatggata |
| 6 | | ggagacttgctgggcggaccgctcatgagcagggaaagccgcgtcattgccgaactgttgctaacc |
| | | gatcccgatgaacagacatggcaagagcaaattgttggccacaacattttacaagcctcttctcct |
| | | aacaccgcaaaacgttacgcggcaacaatcaggcttcgcctgaacacgctggataaaagcgcgtgg |
| | | acattgattgccgaaggtagtgaacgggaacgccaacaacttctgtttgtggctctgatgctacat |
| | | tcgccggtagttaaggattttctggctgaagtggtgaacgatctgcgcaggcagttcaaggaaaag |
| | | ttgcctggcaatagctggaacgaatttgtgaatagccaggttcgcctacatccggtactcgccagc |
| | | tactcagattcatctattgcaaaaatgggaaacaatctggtgaaggcgcttgctgaagcgggttat |
| | | gtggatacgccccgcagacgtaacctgcaggcagtttaccttttaccggaaactcaggcagtgtta |
| | | cagcgcctgggacaacaggacttgatatctattctggagggaaaacggtgatagatcccgttcttg |
| | | aatatcgcctgtctcaaatccagagtcgcattaacgaagatcgcttcctcaaaaataacggctccg |
| | | gaaatgaaattggtttttggatctttgattatcccgcgcagtgcgaactgcaggtacgggagcatt |
| | | tgaaatatctgctccggcatctggaaaaggaccataaatttgcctgtctgaatgtcttccaaatca |
| | | tcatcgatatgctcaatgaacgcggccttttcgagcgcgtctgccagcaggaagtcaaagtgggta |
| | | ctgagacgctgaaaaagcagcttgctggtccgttaaatcagaaaaagatcgctgattttatagcga |
| | | aaaaagtcgatctggctgcccaggattttgtcattcttaccggcatgggcaacgcctggccattag |
| | | tacgcggtcatgaactgatgagtgccttgcaggatgtcatggggttcaccccactgctgatgtttt |
| | | atcctggcacctacagcgggtacaacctttccccgctcacagacaccggttcacaaaattattatc |
| | | gcgctttcagactggtaccagatacgggacccgcagcaacattgaatcctcaatgaagagcataac |
| | | aatgaatattgaacagatttttgaaaaacctctaaaacgaaatataaacggggtagtcaaagcaga |
| | | gcaaaccgatgatgccagcgcgtacatcgagttagatgaatatgtcatcacccgcgaactggaaaa |
| | | ccatcttcgccatttcttcgaatcctatgttcctgccactggcccggaacggatccgtatggaaaa |
| | | caagatcggcgtatgggtttcaggcttcttcggttcaggtaaatcgcactttattaagattctttc |
| | | ttatcttttatctaaccgcaaagttacacataacggtacggaacgtaatgcttactccttctttga |
| | | agataaaatcaaagatgcattattccttgccgatattaacaaagcggtgcattacccgactgaagt |
| | | cattctgttcaatattgattcgcgtgccaacgtagatgacaaagaagatgccattcttaaagtctt |
| | | cctgaaagttttcaacgaacgcattggatactgcgctgattttccgcatattgcccatcttgagcg |
| | | cgagctggataaacgcggtcagtatgaaacctttaaagccgcgtttgccgatatcaatggctcgcg |
| | | ctgggaagacgagcgcgacgcttactacttcatcagcgatgacatggcacaagcattaagccaggc |
| | | cacgcagcagagtcttgaatcctcccgccaatgggtggaacaactcgacaaaaacttcccgctgga |
| | | tatcaataatttttgccagtgggtaaaagagtggctggatgacaatggtaagaacatcctctttat |
| | | ggtggatgaagtcggtcagttcattggcaaaaatacgcaaatgatgctgaagctgcagactattac |
| | | tgaaaaccttggggtaatttgcggtggccgcgcatgggttatcgtgacttcgcaggccgatatcaa |
| | | cgcggcaatcggtggtatgagcagtcgcgacggacaggacttctccaagatccaggggcgcttctc |
| | | tacacgcctgcaactttccagctctaacacatcagaagttatccagaaacgtttgttggtaaagac |
| | | tgacgaagcaaaagcggcactggcaaaagtgtggcaagagaaagccgatatcctgcgtaaccagct |
| | | ggcttttgacactacaacaactactgcactacgtccttttaccagcgaagaagagttcgttgacaa |
| | | ctacccgtttgtcccgtggcactatcagattctgcaaaaagtgtttgaatctattcggacgaaagg |
| | | tgcagcgggtaaacaattggccatgggtgagcgttctcagctggaggcattccagacggcggcgca |
| | | gcaaatctcagcgcaagggctggattctctggtgcctttctggcgcttctatgccgccattgagag |
| | | cttcctggaacctgccgttagccgcaccatcactcaggcttgccagaatggcattcttgatgagtt |
| | | cgatggcaacctgcttaaaacgctgttcctgatccgctatgtggaaacgctgaaaagcaccctgga |
| | | taacctggtcacattgtctatcgataggatcgatgccgataaagttgagttgcgccgccgggtcga |
| | | aaaaagtctcaacacgcttgaacgcctgatgctcattgcgcgcgttgaagataaatatgtgttcct |
| | | gaccaacgaagagaaagagatcgaaaacgagatccgtaacgttgatgtcgatttctctgcgatcaa |
| | | caaaaaactggcatcgatcatctttgatgacattctgaaaagccgtaaatatcgttatccggctaa |
| | | caagcaagactttgatatcagccgcttcctgaacgggcatccattagacggcgcagtgcttaacga |
| | | tctggtggtgaagatcctgacccctaaagatccgacttattcgttctataacagcgatgcgacctg |
| | | tcgcccttatacgtcagaaggcgacggctgtattttgattcgtctgcccgaagagggccgtacctg |
| | | gagcgatattgatttagtcgtccagactgaaaagttcctcaaagataacgccgggcaacgtccgga |
| | | acaggcaaccctgctctcagaaaaagcgcgtgaaaacagcaaccgggaaaaattactccgtgttca |
| | | gttggaatcactacttgcagaagcagacgtctgggcgattggcgaacgcttaccgaaaaaatcctc |
| | | cacgccatcgaacattgtcgatgaagcctgccgttacgtgattgaaaacaccttcggcaagctgaa |
| | | gatgctgcggccttttaacggtgacatctcccgtgaaattcatgcattactgacggttgagaacga |
| | | caccgaactggatctcggtaacctcgaagagtccaaccccgacgccatgcgcgaggtagaaacctg |
| | | gatcagcatgaatatcgaatacaataaacctgtgtatttacgcgatattctgaaccattttgcgcg |
| | | tcgcccttatggctggcccgaagacgaagtgaaactgctagtagcccgtctggcctgcaaaggtaa |
| | | attcagcttcagccagcaaaacaacaacgtcgagcgaaaacaggcgtgggagttatttaataacag |
| | | ccgccgccatagcgaattgcgtctgcataaagttcgccgtcatgatgaagcgcaggtgcgtaaagc |
| | | cgcgcaaaccatggctgacatcgctcagcagccgtttaacgaacgggaagagccggcgctggttga |
| | | acatattcgtcaggtatttgaagagtggaagcaagagctgaacgtattccgcgccaaggcagaggg |
| | | cggaaacaatccggggaaaaacgagattgaatccggtctgcgcctgcttaatgccattcttaatga |
| | | gaaagaagattttgccctgatcgaaaaagtctcatcgctgaaagatgaacttctggatttcagcga |
| | | agaccgtgaagatttggtcgacttctaccgtaagcaattcgccacctggcaaaaactgggtgctgc |
| | | gctgaatggcagctttaaatctaaccgcagcgcgctggaaaaagacgccgcagcggttaaagcgct |
| | | gggcgagctggaaagcatctggcaaatgccggaaccttataagcatctcaatcgcatcacgccgtt |
| | | gattgaacaggtccagaacgtcaaccatcagttagtcgaacagcatcgccagcacgccctcgaacg |
| | | cattgacgcccgcattgaggaaagccgtcaacgcttgctggaagcgcacgccacgtcggagctgca |
| | | aaacagcgttctgctgccgatgcaaaaagccagaaaacgcgctgaagtcagccagtcgattccgga |
| | | aattttggcggaacagcaagagacaaaagcgctgcaaatggatgcagataaaaagattaacctgtg |
| | | gatcgacgagctgcgtaaaaagcaagaagcacaactccgggcagcaaatgaagctaaacgcgctgc |
| | | cgactcagaacagacttatgttgtggtggaaaaaaccgttatccaaccggtaccgaaaaaaacgca |
| | | tctggtgaatgtcgccagtgagatgcgtaatgccaccggtggtgaagttctggaaacgaccgaaca |
| | | ggtggaaaaggcgctcgacacgttacgcacaacgctgctggccgtcattaaagcaggcgatcgcat |
| | | tcgccttcagtaactcccatttcagggcagcactctgctgccctttgcaggattttctatgaatac |
| | | caataacattaaaaaatatgccccacaggcccgtaacgacttccgcgatgcggtgatccagaagct |
| | | aacgacgcttgggatcgctgcagataaaaaaggcaatttgcagattgccgaggccgaaaccattgg |
| | | cgagaccgtgcgttacggtcagtttgattacccgttatcgacccttccccgccgcgaacggctggt |
| | | aaaacgcgcccgtgagcagggttttgaggtgctggttgagcactgcgcctacacctggtttaaccg |
| | | cttatgtgcaattcgctatatggagctacacggttatcttgagcacggcttccgtatgttgtccca |
| | | cccggagacgccgaccgcgtttgaggtgctggatcatgtgccggaagtggcagaagccctgctgcc |
| | | ggaaaataaggcgcagctggttgaaatgaagcMccggtaatcaggacgaagccctgtaccgcgaac |
| | | tgctgctggggcagtgccacgccctgcaccacgcgatgccgttcctgtttgaagcggtagatgacg |
| | | aagcggaactgctgttgccggataacctgacccgtaccgactctattctgcgtgggctggttgatg |
| | | atattccggaagaagactgggagcaggtagaggttatcggctggctgtatcagttctatatttcgg |
| | | aaaagaaagatgccgtgattggcaaagtggtgaagagcgaagatattcctgccgccacccagctgt |
| | | ttacgccaaactggattgtgcagtatctggtacaaaactccgttggccgccagtggttgcagacct |
| | | acccggactcgccgctgaaagacaaaatggagtactacatcgagcctgcggaacaaacgccggaag |
| | | tgcaggcgcagctggcggcgattaccccagccagcattgaacccgaaagtattaaagtgctcgacc |
| | | cagcctgcggctccggtcatattttgattgaagcctataatgtgctgaaaaatatctacgaagagc |
| | | gtggttatcgcgggcgtgatattccacaactgattctggaaaataatatttttggtcttgatatcg |
| | | acgaccgcgcggcacagctttccggctttgcattattaatgatggcgcgtcaggatgaccgcagaa |
| | | tatttacccgcgatgtacgtctgaatattgtctctttgcaggaaagcctgcatctggatatcgcca |
| | | aactctggcagcaactgaatttccaccagcaggtacaaaccggcagtatgggggatatgtttgctg |
| | | aaaataacgcgttaacccaaactgacagcgcagaatatcagctgctgatgcgcacgctgaaacgct |
| | | ttgtgaatgcaaaaacgctgggctcactgattcaggtgccgcaggaagaagaagcggaactgaagg |
| | | tattcctggacgcgttgtatcgcctggaacaggaaggcgatttccagcagaagacggcggcaaaag |
| | | cgtttattccgtttattcagcaggcgtggattttagcgcagcgatatgatgcggtagtggcgaatc |
| | | cgccgtatatggggggtaattatatggagacagaacttaagaatttcgtctcttcttactaccctc |
| | | aaggaaaggcggatctttattcttcatttatggtcagattacttttacaattaaaagataatcgca |
| | | ctttaagcctaatgaccccctttacttggatgaatttatcatcatttgaagagctccgaaaaatta |
| | | tacttacaaatttcagcattcagtcattagtacagcctgaatatcattcattttttgagtcagctt |
| | | atgtcccaatttgtgcttttagcatttcaaataccccattaagctggaatgcaaaattttttgatt |
| | | tatcagatttttatggagaaaaaaatcaagctccaaattttcagtatgcaattaaaaatgacaata |
| | | aatgtcattggaaatataacagaatcaccacggactttctatgtactcccggatatatcattgctt |
| | | actctctgcctgattctgcgttatcttgcttcaaaacatccaaaaaacttcatgatgtttgcaatc |
| | | taaaacaaggattaattactggtgataatgaaagatacctaagattctggcatgaaatcagctata |
| | | actctttcagtctcaatgaaaaaagaaaaaaaacaaaatggttcccatatcaaaaaggtggtgcat |
| | | accgtaaatggtatggtaataatgattatgttgttgactgggagaatgatggttattccattaaaa |
| | | acttttataatgacaaaggtaaattacgctcacgccctcaaaacatacaattttattgtaaagagg |
| | | gtttaacatggacaagtttaactatttcgtcactatcgatgagatatgtaccaaatggatatattt |
| | | ttgatgcaaaaggacctatgtgttttccgaaatcctctttggatatctggaatattcttggctatg |
| | | cgaatagcaaagtaatagatatatttctcaaacaattagcgcccaccatggattattctcaagggc |
| | | ctgttggaaatgtcccattcaaatttaacgatggtgatttgaacgagataataaaagaactcgtaa |
| | | acattcacaaacgtgactgggatgaaaatgaaacatcttttgagtttaagagagatatgttggttc |
| | | atttttcaagagatattaacactattaagggtagttttacactaaggcaaggggaaaataaaaaag |
| | | cgattaacagaacaaaatttttagaagaaatgaataactctttctttataaattgctttaatctaa |
| | | ctgatattttatctccagaaattgaactaaacaaaatcacgttaacgcatgcaactattgaaattg |
| | | atattcaaaaaataatttcatatgcaataggctgccaaatgggacgttactcccttgatcgcgaag |
| | | gtctggtatacgctcatgaaggcaataatggcttcgccgatcttgtcgccgaaggtgcttataaaa |
| | | gcttcccggctgatagtgacggcattctgccgctaatggatgaagagtggtttgacgatgacgtca |
| | | cctctcgcgtcaaggagtttatccgcaccgtttggggcgaagaatatttgcgcgaaaacctcgatt |
| | | ttatagccgaagttctcaagcccaaaaaaggcgaatctgcgctggagaccattcgtcgctatcttt |
| | | ccacccagttctggaaagatcatctgaaaatgtataaaaagcgtccaatctactggctattcagct |
| | | ccggtaaagagaaagcgtttgagtgcttggtgtatctgcatcgctataacgatgccacgctgtcga |
| | | gaatgcgtaccgaatatgtggtgccgctgctggcgcgttatcaggccaatattgatcgcctgaacg |
| | | atcaacttgatgaggcttctggcggtgaatccacacgtctgaaacgcgaacgcgacagcctgatca |
| | | aaaaattcagcgaactgcgcagctatgacgatcgcctgcgtcactatgctgatatgagaatcagta |
| | | ttgatctcgacgatggcgttaaggttaactacggcaagtttggcgatctgctggcagatgtcaaag |
| | | ccatcaccggcaatgccccagaggtgatctaaaccagacggcacgttctcctgttgccgggttctg |
| | | cccggtggcaaataccaccgggaaacgcgccgctgctgacatttctccacctcacttcatgataaa |
| | | atgcgccaccgtgtcaaaatctccttttcgcgttttggcgctttcttattcatcgtaacaacatgg |
| | | gattgtgaacttgcaaaatcaggactttattgctggccttaaagctaaatttgccgaacatcgcat |
| | | cgttttctggcacgatcccgataaacgttttattgaggaactggaacagctcaagcttgaaagcgt |
| | | cacgctaatcaacatgacccacgagtcacagctggcggtaaaaaaacgcatcgagattgatgagcc |
| | | agaacagcagttcctgctgtggttcccccatgatgcgccgcctcatgaacaagactggctgctgga |
| | | tatccgcctttacagcagcgaattccatgccgattttgccgccatcaccctgaacacgctgggcat |
| | | tccccagcttggcctgcgcgagcatattcagcgacgcaaggccttcttcagcactaaacgcacgca |
| | | ggcgctgaaaaatctggcgacagaacaggaagatgaagcctcgctggataagaaaatgattgcggt |
| | | gatcgctggcgcaaagaccgcgaaaaccgaagacattttgttcaacctgattacccagtacgttaa |
| | | ccaacaaatagaagacgacagcgaactggaaaacacgcaggcgatgctgaaacgccacggtctgga |
| | | ctcggtattgtgggaaatgctcaaccacgaaatgggctaccaggcagaggagccatcgctggaaaa |
| | | cctgctcctgaaactgttttgtaccgatctctctgcccaggccgacccacagcagcgcgcctggct |
| | | ggaaaaaaatgtcctgctgacgccatccggcagagcatctgccctggcatttatggtgacctggcg |
| | | tgccgatcgtcgctataaagaggcttatgactactgcgctcagcaaatgcaggccgccctgcaccc |
| | | ggaagatcattaccgactcagctcgccgtatgatttgcacgaatgcgaaaccaccctcagcatcga |
| | | acaaaccattattcatgcgctggtaacacagctgctggaagagagcaccacgctcgatcgggaagc |
| | | ctttaaaaaactgctctctgagcgccagagcaaatactggtgtcagacacaaccagagtattacgc |
| | | catctatgacgcattgcgccaggctgagcggttgctgaacctgcgcaatcgccacatcgatggttt |
| | | ccactaccaggacagcgccaccttctggaaagcctactgcgaagaactgttccgcttcgaccaggc |
| | | ttatcgcctgtttaatgaatatgccttgctggttcacagcaaaggagcgatgatcctcaagagcct |
| | | ggatgattatatcgaggcgctctacagcaactggtatctggcagagttaagccgtaactggaacga |
| | | agtgctggaagcggaaaatcgtatgcaggcgtggcaaatccctggcgtgccgcgtcagcagaactt |
| | | cttcaatgaggtggtgaagccacagttccaaaatccgcaaatcaaacgcgtgttcgtgataatttc |
| | | cgatgccctgcgttatgaagtggcggaggagctggggaatcaaatcaataccgagaaacgctttac |
| | | cgcagaactgcgctcgcagctcggcgtgctccccagctacacccaactgggaatggcggcattgct |
| | | gccccatgaacaactttgctatcaacccggtaacggcgacatcgtttatgctgatgggctgtcgac |
| | | ctcgggtattcctaaccgcgataccattctgaagaactataagggaatggcgataaaatcgaagga |
| | | ccttctggagttaaaaaatcaggaagggcgagaccttattcgcgattacgaagtggtgtatatctg |
| | | gcataacacgattgatgccactggcgacacggcatccacggaagataaaaccttcgaagcgtgccg |
| | | cacggcggtggctgaactgaaagatttagtcaccaaggtgatcaaccgcctccacggcacacgcat |
| | | ttttgttacggcggatcacggtttcctgttccagcaacaggcgctttcggttcaggataaaaccac |
| | | tctgcaaattaagccggaaaacaccatcaagaaccacaaacgctttattatcggccatcagcttcc |
| | | cgccgatgatttttgctggaaagggaaagtggcggataccgcaggcgtgagcgacaacagcgagtt |
| | | cctgattccgaaagggatccagcgcttccatttctctggcggcgcgcgcttcgttcatggcggcac |
| | | catgttgcaggaggtttgcgttccggtattgcagataaaagccctgcaaaaaaccgccgcagaaaa |
| | | acagccacagcgccgcccggtggatattgtcgcttaccatccgatgattaagctagtgaacaatat |
| | | cgataaagtgagcctgttgcagacgcatccggtgggcgaactttatgaaccgcgtatcctgaacat |
| | | ttacattgtcgacaacgccaacaatgtggtctcgggcaaagagcgcatcagctttgacagtgataa |
| | | caacaccatggaaaaacgcgtacgcgaagttacgctgaagctgattggcgctaacttcaaccgtcg |
| | | caatgagtactggttgatactggaagacgcacaaacggaaacggggtatcagaagtacccggtcat |
| | | tatcgatctggcgttccaggatgatttcttctaagtgaggcgatatgcaaacccatcatgatttac |
| | | ctgtttcaggcgtatccgcaggggaaattgcctccgagggttacgatctggacgccctgctgaacc |
| | | agcattttgctggtcgcgtggtgcgtaaagatctcaccaagcaactcaaggaaggggcaaacgtcc |
| | | cggtgtatgtgcttgagtatctgctcggcatgtactgcgcctctgacgatgacgatgtggtcgagc |
| | | aagggttgcaaaacgttaagcgtattctggctgataactatgtgcgcccggatgaagcggagaaag |
| | | tgaagtcgctgatccgcgagcgtggttcgtacaaaatcatcgataaagtgtcggtgaaactgaacc |
| | | agaaaaaagacgtttacgaagcccagctttctaacctcggcatcaaagacgcgctggtgccctcgc |
| | | agatggttaaagacaacgagaagctactgacgggcggtatctggtgcatgattaccgtcaactatt |
| | | tctttgaagaagggcagaagacctcacccttctcattgatgacgctcaagcctatccagatgccga |
| | | atatggatatggaagaggtgttcgatgcgcgtaaacactttaaccgtgaccagtggatcgatgtgc |
| | | tgctgcgctcggtgggtatggagcccgccaatattgagcaacgcaccaaatggcaccttatcaccc |
| | | gtatgatcccgttcgtggagaacaactataacgtttgcgagctggggccgcgtggcaccggtaaaa |
| | | gccatgtgtataaagagtgttctcctaactccctgttagtttccggcgggcaaacgaccgttgcca |
| | | acttgttctacaacatggccagtcgccagatcggcctggttggcatgtgggatgtggtagcgttcg |
| | | acgaagtcgcggggatcactttcaaagataaagacggcgtgcaaatcatgaaagattacatggcgt |
| | | caggatctttttctcgcggcagagattcgattgaaggtaaagcgtcgatggttttcgtcggcaaca |
| | | tcaatcaaagcgtagagactctcgttaaaaccagccatttgctggcaccatttccgactgcgatga |
| | | ttgatacagcatttttcgaccgctttcatgcctatattcccggttgggaaatccccaaaatgcgcc |
| | | cggaattctttaccaaccgttacgggctgattacggattatctcgctgaatatatgcgcgaaatgc |
| | | gcaaacgcagtttctctgatgcgattgataaattctttaagctgggtaacaacctcaaccagcgtg |
| | | acgttattgccgttcgacgtaccgtgtcggggttgttaaaactcatgcatcccgatggcgcgtaca |
| | | gcaaagaagatgtgcgagtctgcctgacctatgcgatggaagttcgccgccgcgtgaaagagcaac |
| | | ttaaaaaactgggcggtctggagttcttcgatgtgaactttagctacatcgacaacgaaacgctgg |
| | | aagagttttttgtgagcgtaccggaacagggcggcagcgaacttattcctgccggaatgccaaagc |
| | | cgggtgttgtgcatctggtcactcaggcagaaagcggcatgaccgggctgtatcgttttgaaacac |
| | | agatgactgccggtaatggtaagcatagtgtatcgggtctgggttcaaatacctccgcgaaagaag |
| | | ctatccgcgtcggtttcgattacttcaaaggcaatttgaatcgggtaagcgcggccgcgaaattct |
| | | ccgatcatgaatatcaccttcatgtcgttgaactgcataatactggcccaagcaccgcaaccagtc |
| | | ttgctgcgcttatcgctttatgttcgatattgctggcaaaaccggtgcaggaacagatggtggtgt |
| | | tgggcagtatgacgcttggtggggtaattaacccggtgcaggatcttgccgccagtttgcagctcg |
| | | ccttcgacagcggtgcaaaacgggttctgttgccgatgtcctcggctatggatattccaacggttc |
| | | cggcagagttatttaccaagtttcaggtgagtttttactcagacccggttgatgctgtttataagg |
| | | cgctgggtgtgaattaacgtagtaactattttaatgaac(SEQ ID NO: 269) |
| 7 | Control | ggtgaacgtttggttgatagggtagtaaaactagtaatcatcctataattagctatattcgtggtt |
| 8 | | attagattgaaaacagataacattaacaaaatctataaatcgatttgaatgatttttttcatcaat |
| 9 | | actgttgtaagctcctgctatcaaaagttttgcacacaatctataagctcccagaattgcttgtat |
| 10 | | aaatgctatcattggcgctgtcccgatcgagggagcaaggaggggactctcttgtgccatgcgatt |
| 11 | | aatcactggggctctaagtgaaatttagtgggactaaatactaattggaacgtgagataaaaatgc |
| | | acaaatatccctctataatagttaatatcaaccttcgagaagccaaactgaaaaagaaggtacgtg |
| | | agcatttacaatccttgggttttacaagatctgattctggagcgctccaggccccgggaaatacca |
| | | aagatgtaatacgggctcttcatagttctcaacgagctgagcggatatttgcaaaccaaaagttca |
| | | taacgctaagagcggcaaagcttattaaatttttcgcatccggcaatgaggtcattccggataaga |
| | | tttcaccggtacttgaacgtgtaaagtcaggaacctggcaaggagatctctttaggttagcagcat |
| | | taacttggtccgtacctgtttcaagcggatttggaaggcgtctccggtatcttgtatgggatgaaa |
| | | gcaacggaaaattgatagggctgatcgcaattggtgaccctgtgttcaaccttgcagtccgagata |
| | | atttgattgggtgggatactcatgccagaagttcccggcttgttaatttgatggatgcatacgtcc |
| | | tcggtgctcttcccccttataatgccctgctgggaggaaaattaattgcatgtctgcttcgtagcc |
| | | gcgatctttatgatgactttgcaaaggtctatggtgataccgttggagtaatatctcaaaaaaaga |
| | | aacaagcacgtcttttggctattacaacaacatcgtctatggggcgctcatcggtatataaccgtt |
| | | taaagctggatggaattcaatatttaaaatcgattggatatacaggcggttgggggcattttcata |
| | | tacctgatagcttgttcattgaattacgtgattacttacgtgatatggatcacgcttatgcagatc |
| | | attatatgtttggtaatgggcctaactggcgtttacgtacaactaaggcagctttaaatgcactag |
| | | gatttagagataatttgatgaagcatggaattcaacgtgaagtgtttatcagtcagctagcagaaa |
| | | atgcaactagtattctgcaaacaggcaaaggtgaaccagatctaacctctttgctttctgctaaag |
| | | agatagctgagtgtgcgatggcacgatggatggttccacgatcaattcgcaatccagaatatcggc |
| | | tttggaaagcaagagatctatttgattttattagtaatgactcgctaaactttcccccgtttgacg |
| | | agatagcgaaaacagttgtctaatcttaactgaagggggagtaagtgaattacgctattgataagt |
| | | tcaccgggacactgatattagcagctcgagcaacgaaatatgctcaatatgtttgcccagtttgta |
| | | aaaaaggtgttaacctccgtaaagggaaggttatacccccatattttgctcatttgcccggacatg |
| | | gtacgtcagactgtgaaaattttgttcccggaaattctatcattgtcgaaactattaaaactattt |
| | | caaagcgatatatggatttgcgcttattgattcctgtcggaagtaatagtcgagagtggtcattag |
| | | aattagtgttgccaacctgtaatttatgtagagcaaagataacgttagatgtaggaggcagaagcc |
| | | aaacgcttgatatgaggagtatggtaaagagtcgccagattggtgctgaattatcagtaaaatctt |
| | | accgtattgtttcatatagtggtgaaccagatccaaaatttgtaacagaagttgaaagagaatgcc |
| | | caggtttaccttctgagggagcagcagttttcactgctttagggcgtggggcatcgaagggatttc |
| | | cacgagcacaagagttaagatgtactgaaacatttgcctttctttggcgacaccctgttgctccag |
| | | attttcctgatgaattagaaataaaaagtttagctagtaaacagggatggaatttagctcttgtta |
| | | caattcctgaagtcccttctgtggagagtatttcatggctaaaatcttttacataccttcctgttg |
| | | ttcctgccagaacatctattacagcaatttggccgttcctaaatcaaaaaacaagtattaatcatg |
| | | tcgaatgtgtttattctgacacaatattgttgtcaacaaatatggcaccaacatcatcagaaaatg |
| | | ttggaccaactatgtacgcacaaggttcctctttattactttcagcggttggtgttgaaacatcac |
| | | ctgctttcttcattctaaatcctggagaaaatgactttgtgggcgtttctggctcaattgagcagg |
| | | acgtaaacttatttttttctttctataaaaaaaacgtttctgtacccagaaaatatccctcaatag |
| | | atttggtttttactaagaggaataaagaaaagaccatcgtttccttacatcaaagaagatgcattg |
| | | aagttatgatggaagcacgaatgtttggccataaattagaatacatgtctatgccttctggtgttg |
| | | aaggagtggcaagaattcaaagacaaactgaaagtaatgttattaagttagtttctaatgatgaca |
| | | ttgcagctcatgataagagcatgcggttactatctcctgttgcgttatctcaattatctgattgct |
| | | tagcaaacttaacatgtcatgtagaaatagattttttaggtcttggtaaaatatttttacctggtt |
| | | cttctatgctatcattagatgacgggaaatttattgaattatctcctaatcttcgctcacggatat |
| | | taagttttatacttcaaatggggcacaccctccatggttttagtttaaataatgattttttattag |
| | | ttgagaaattagtggatttgcagccggaaccacacttattaccgcattatagagcattggtaaaag |
| | | aagttaagaccaatggatttgaatgtaaccgctttagataaggtgccttcgaatgagttaccaata |
| | | tagccaagaggcaaaggaacggatctctaagttgggacaatccgaaattgttaactttatcaatga |
| | | gatttctccaactttacgacgtaaagcttttggttgtttaccaaaagtaccgggattcagggcagg |
| | | acatcccactgaaattaaagaaaaacagaaaagattgattgggtatatgttccagtcacatccttc |
| | | ctctgaggagagaaaagcatggaaaagtttttctcttttttggcagttttgggctgaagagaaaat |
| | | tgacaaatcatttagtatgattgataatttaggattaaaagaaaactctggctctatttttattag |
| | | agagcttgctaaaaactttcctaaagttgctagagagaatatcgagcgcctgtttatctttagtgg |
| | | gtttgctgatgatccagacgttataaatgcatttaacctttttcctcctgcagttgttcttgcccg |
| | | cgatatcgtgattgatactcttccaattcgtttagatgagcttgaagcacgtattagtttaattgc |
| | | cgataatgttgagaaaaaaaataatcatattaaagaacttgagttaaaaatagatgctttttccga |
| | | acagtttgataattactttaataatgaaaagagcagtttaaaaataattaatgaactacaatcttt |
| | | gataaactcagagactaaacaatctgatattgctaataaagctattgacgagctttatcattttaa |
| | | tgaaaaaaacaaacagctaatattatctcttcaagaaaaattagattttaatgctctggctatgaa |
| | | tgatatttctgagcatgaaaaattgataaaaagtatggctaatgacatttcagaatttaaaaatgc |
| | | attaacgatcttgtgtgataataaaataaagaataacgagttagattatgtcaatgaattaaaaaa |
| | | actcactgaacgaatagatacacttgaaataaacacatctcaagctagcgaagtgagtgtcaccaa |
| | | tagatttacaaaattccatgaaatagcgcactatgaaaattatgagtatattcatcctccgaagac |
| | | atatctaatagaatttctttaaatttacaggctgttggattgacaaaaaattcagcagaaaaattg |
| | | gctagattgacattagctaccttcgtttctggacaaatcattcaattcagtggctctttggcagat |
| | | attatcgcggatgcaattgccattgctattggtgcaccacgttatcacatatggagagttccagtt |
| | | ggtattatttctgacatggatgcttttgattttatagagactatagctgaatcatctcgctgtctc |
| | | cttttgaaaggggccaatctttcagcatttgagatttatggagcggcaattagagatatagttgtt |
| | | caacggcaaatacatccaacaaattatgaccatctggcattgatagctacctggaaacaaggccca |
| | | gctacattccctgatggaggaatgttggccgagttgggacctgttattgatactgatacattaaaa |
| | | atgcgtggtttatcagctactttaccccaattgaaaccaggttgtcttgccaaggataaatggaca |
| | | aatattgatggactacatcttgatagtgttgatgattatgtagatgaattaagagcattactggac |
| | | gaagctggatttgatgggggaactttgtggaagagaatgattcatattttctatacttcactcata |
| | | aggatccctaatggaaattatatttatgatctttattctgtcttgtctttttatactcttacatgg |
| | | gcaaaaattaaaggtggccccgtccaaaagatagaagatattgccaatcgtgaattaaaaaattat |
| | | agtgcaaaaatatcttcttgaggaggtggttaatggagtggagagcagtatcacgagacaaagcac |
| | | tggatatgttatcaactgcattaaattgtcgatttgatgatgaagggttgagaatttcagcagttt |
| | | cagaatgcttaaggagcgtattatatcaatattctatatctgaaacagaagaagctaggcaaactg |
| | | taacctcgcttcgactcactagtgcagtaaggcgaaaattggtacctttatggccagacattgctg |
| | | atattgataatgctatacatccgggcattatgtctatattgaacagcttggctgaattgggtgaca |
| | | tgattaagttagaaggtggtaattggctaacagctcccccacatgcagtacgaattgacaataaga |
| | | tggctgttttttttggtggagagccttcctgtacattttcaacgggcgtggtagctaaatctgctg |
| | | gaagagttcgcttggttgaagaaaaagtgtgtactggaagtgttgaaatctgggatgcaaatgagt |
| | | ggattggtgccccagcagaaggcaatgaagaatggtcatccagactactatctggaactatttccg |
| | | gctttatcgatgcacctggcaatatgagtgaaacgactgcatatgtgcggggaaaatggctccatt |
| | | tgtcagaactttcttttaataaaaagcaaatctacttatgcagaatgtccgttgataatcactttt |
| | | cctattatttaggagaaattgaagctggacgcttatgtagaatgaattcgttagaatcgtctgatg |
| | | atgtcagaagattacgtttttttctcgatacaaaagataattgtccgctaaaggtccgtatcaaaa |
| | | tatctaatgggctagcaagattaagattaaccagaagattaccaagacgagaaacgaaggtactcc |
| | | tgctaggctggagagaatcaggttttgaaaatgaacattcaggaataacacaccatgtattccccg |
| | | aggaaatattacccatagtgcgtagcgcttttgaagggcttggtattatttggattaacgaattca |
| | | cgcgacggaatgaaatatgattaataaaaataaagtaactgaacgttcaggtatacatgataccgt |
| | | gaaaagccttagtgaaaatctgagaaaatacattgaggcacaatatcatatccgggatgaagggtt |
| | | aattgctgagcgacgagcgcttttacagcaaaatgaaactattgctcaagctccttatatagaagc |
| | | aaccccaatttatgaacctggtgcgccatacagtgaattgcctattcccgaagcagcaagtaatgt |
| | | gctaactcaactatcagaacttggaattggcctctatcaacgcccctataaacaccaatcacaggc |
| | | acttgagtcatttcttggcgaaaacgcttctgatctggtcattgcaacaggtacaggctccggtaa |
| | | gactgaaagctttctaatgccaattattggaaaattggcgattgaatcttccgagagacctaaatc |
| | | tgcatcccttccaggttgtagagcaattttattatatccaatgaatgcattagttaacgatcaact |
| | | tgctcgtatcagacgtctttttggtgattctgaagcctctaaaatactgagatctggaagatgtgc |
| | | ccctgtacgctttggcgcttatacgggaagaacgccttaccctggtcgtcgtagctctagacgaga |
| | | cgagctttttatcaaaccccttttcgatgagttttacaataaactcgcaaataacgcccccgtacg |
| | | tgcggaactgaaccgcattggtcgctggccaagtaaagatcttgatgctttttatgggcaaagcgc |
| | | atctcaggctaaaacctacgtctcaggcaaaaaaacgggtaagcaatttgttttgaacaattgggg |
| | | ggagaggctaattacccagcctgaggatcgtgagctaatgacccggcatgaaatacagaatcgctg |
| | | tccagaattactgataacgaactactccatgcttgagtatatgctgatgcgacctatcgagcgtaa |
| | | tatttttgagcagactaaggaatggctcaaagctgatgagatgaatgagcttatcttagtgcttga |
| | | tgaagcgcatatgtatagaggagcagggggagcagaggtagcccttttaatacgtcgcctctgtgc |
| | | tcggttggatattccccgggaacgtatgcgctgcatccttaccagtgctagtctagggtccattga |
| | | ggatggagaacgttttgcccaagacttaactggcttatcaccaacctcttcgaggaaatttcgaat |
| | | tattgagggtacaagggaatcgcgtcctgagtcacaaattgttaccagtaaagaagctaatgcact |
| | | ggctgaattcgacctaaattcatttcagtgcgtagctgaggatcttgaatctgcatatgcagcaat |
| | | agagtctcttgccgaacgaatgggctggcaaaagccgatgataaaagatcatagtacactacgtaa |
| | | ttggttatttgataatttgactggttttggtcctattgaaacgcttattgaaatagtttcaggtaa |
| | | agcggttaagctaaatatcttgagtgaaaacctttttccagactctccacagcaaatcgcagagcg |
| | | agcaacagatgcattactcgcattgggttgctatgctcagagggcatccgatggcagagtgcttat |
| | | tccaactcgcatgcatcttttttatcggggattaccaggtctttatgcctgtatagatcccgattg |
| | | taatcaacgtttgggtaaccatagcgggccaactatacttggccgcctttatacgaaaccactgga |
| | | tcaatgtaaatgcgcttcaaaagggcgagtctacgaattatttacccaccgtgactgcggtgcggc |
| | | ttttattcgtggatacgttagttccgaaatggactttgtatggcaccagccgaacggaccattatc |
| | | agaagatgaggatatcgatcttgttcccatagatatattggtcgaggaaacacctcatgtacatag |
| | | tgattaccaggacagatggctacatatagcaacaggacgcctttctaaacagtgtcaagatgagga |
| | | ttctggttatcgtaaagtctttatacctgaccgagttaagtctggatcagaaattacatttgatga |
| | | atgccctgtttgtatgcgtaagacaagaagtgctcagaatgaaccgtctaaaattatggatcatgt |
| | | tacaaaaggggaagcaccttttacaacgttagtacgtacacagatatctcaccagccagcgagtcg |
| | | tcctattgatggtaaacatcccaatgggggaaaaaaagtacttattttttctgatggccgacaaaa |
| | | agcagctcggcttgcacgtgatattcctagagatattgagcttgatttgtttcggcaatccattgc |
| | | tctcgcctgttctaaactgaaagatatcaatcgggaacccaaaccaacatcagtactttaccttgc |
| | | tttcctatcagtcctttctgaacatgacttgcttatttttgatggggaagattcacgaaaagttgt |
| | | aatggcccgtgatgaattttatcgtgattataatagcgatctggctcaagcttttgatgatagctt |
| | | cagcccccaagagtcaccgtcacgatataaaatagcgttgcttaaacttttatgtagcaattacta |
| | | ttctctttccggaacaacagttggttttgttgaaccatcgcagcttaaatcaaaaaaaatgtggga |
| | | agatgtgcagtccaagaagctcaatattgagagcaaggatgttcatgctttagctgttgcttggat |
| | | tgataccttactcactgaatttgcttttgatgaatctattgattcgacactacgaatcaaagcagc |
| | | tggattctacaaacccacttggggtagtcaaggacggtttggaaaagctcttaggaaaaccctgat |
| | | acagtatcctgctatgggggagctttatgtggaagttttggaggagatttttcgtactcatctgac |
| | | attaggaaaagatggtgtctactttcttgctccaaatgcactacgtctgaaaatagatctcttgca |
| | | tgtctggaaacaatgtaatgactgcacggcactaatgccatttgctttagaacattctacttgcct |
| | | tgcttgtggtagtaacagtgtcaaaacagtcgagccgtcggaaagcagctatattaatgcacgaaa |
| | | aggattctggcgttcgccggtagaagaagttttggtttcaaattcgcggcttctaaaccttagcgt |
| | | tgaagagcatactgctcaactctcacatagagatagggccagcgttcatgccactacagaactcta |
| | | cgaactgagattccaagatgttcttattaatgataacgacaagcccattgatgtacttagttgtac |
| | | gacgacgatggaagtgggggttgatattggatctctggttgctgttgctttaagaaacgtccctcc |
| | | gcaacgagaaaattatcagcaacgtgctgggcgagcaggccgccgtggcgcatctgtttcaacggt |
| | | ggttacatattctcaaaatggccctcatgatagttattatttccttaatcctgaacgcattgttgc |
| | | aggttctcctcgtacacctgaagtgaaagtaaataatcccaaaatagccagaagacacgttcattc |
| | | ttttttagttcagaccttttttcacgagttaatggaacaaggaatttataatcccgcagagaaaac |
| | | tgccatacttgagaaagcacttggtactacacgagatttttttcatggagcaaaagatactggcct |
| | | aaatctcgatagctttaataattgggttaaaaaccgtattctatctactaatggtgatttgagaac |
| | | aagtgttgcagcatggcttcctcctgttcttgaaactggagggctttctgccagtgactggtttgc |
| | | taaggtagcagaggaatttttaaatacactccatgggctggctgaaattgttccacaaactgccgt |
| | | tcttgttgatgaggaaaatgaagatgatgagcagacttctggtggaatgaaatttgcacaagaaga |
| | | attacttgagttcctgttttaccatggtttattaccaagttatgcatttcctacaagcctctgtag |
| | | tttcttggtagaaaaaattgtaaagaatattagaggttcttttgaggtgcgaacagtacaacagcc |
| | | tcagcaatcaatttctcaggctctgagtgaatatgccccgggacgtttgattgttattgataggaa |
| | | aacctatcgctctggtggtgttttttctaatgcattgaaaggcgaactaaaccgggcaagaaagct |
| | | tttcaataatcccaaaaagtttattcattgcgataagtgctcttttgtccgcgatcctcataataa |
| | | tcagaatagcgaaaatacttgtccgatctgtggtggcattctaaaagtagaaataatgattcagcc |
| | | cgaagtctttggacctgaaaatgccaaggaacttaatgaggacgacagagagcaagaaatcaccta |
| | | tgtaacagcggcacaatatccacaacctgttgatcctgaagattttaagttcaataatggaggtgc |
| | | tcatattgtttttactcacgcaatagatcagaaactggtgacggtgaaccgagggaaaaatgaggg |
| | | ggagtccagtggtttttcagtatgttgcgaatgtggtgcggcctccgtttatgattcctactcacc |
| | | ggcaaagggggcacatgaaagaccgtataaatatatagcaactaaggaaacgcctcgcttatgctc |
| | | tggcgagtataaacgcgtttttctcggacatgatttccgtactgatttgcttttattacgaataac |
| | | cgttgggtctccgcttgtaactgatacttcaaatgctatcgttttacggatgtatgaagatgcatt |
| | | atatacaatagcggaagcactaaggcttgcagctagtcgccataaacaactggatcttgatcctgc |
| | | tgagtttggctctggtttcagaattttacccactatagaggaagatactcaggcattggatctctt |
| | | cctttatgatactttatccggcggtgcgggttatgcggaagtagcagcagcgaatctagatgacat |
| | | tcttactgcaacactcgcattgttagaaagctgtgagtgcgatacctcctgtacagattgtctcaa |
| | | tcatttccacaaccagcatatacaaagccgtctcgataggaaactaggtgcatctttacttcgtta |
| | | tgcactatacggaatggttcctcgttgtgcttcacctgatattcaggtagaaaaattgtctcaatt |
| | | gagggcaagtctggaattggatggttttcaatgcataattaagggaactcaggaggcacctatgat |
| | | tgtgagtttgaatgaccgttctattgcagtgggaagttatcctggtcttattgatcgacccgactt |
| | | tcaacacgacgtatataagtcaaagcatactaatgctcatatagcctttaatgaatatcttcttcg |
| | | ttcaaatctgccacaatcgcatcaaaatattagaaaaatgttgcgctgatagcagcagtattgagt |
| | | gccctaaagccctgtagggcactcaaggttttcagtgcgtgagcgggctttaactgaagccataaa |
| | | tgtacgtatgggagaaaatgtgaccatttaactcgccagcaactattgcacaatgtaaaattatgc |
| | | ccattgag (SEQ ID NO: 270) |
| 12 | Control | acatcccgtcatcatgccatcacgacgcgctgagacgctgaaaaaataaaatcagcaccaccgtca |
| | | gcgcgcagtgctttccccgcctcgcccgcccgcttcatgagacggttttaatgcagttgcattatg |
| | | tcccgctcctcagtgctgcgctccatcctgattacaaaaaccgttatcaaaaacacatgcaaatag |
| | | acgcagtcaaatgcgctaccgcctctcgcaataccttcaatttcatgataaaaaacatcatcccta |
| | | acaagagcattatcctcatgaaaaaagtatatgaactaaccagtgaagaagcactgtcatattttc |
| | | ttcgccatgactcctacacaacattagaattaccggcttatattaatttcaccacattattaaatg |
| | | atattaattcatctatccataacaaaaaaattaaaattgaaccaaccgccaaggagctgatgggta |
| | | aagatatcaattatgaggtgcttgtcagtaaagatggtctatatagctggcgtaggataacactta |
| | | tcaatcccctttattatgtctacttctgtagaaaaatcacagcaccagcaacctgggaaatcataa |
| | | cagaaaaattcaaatcttttgaatcaaacgacctttttacatgttcaagcatccccgtcagaaaag |
| | | acaactcgtcaaacattgctgcgtctgtaatgaattggtgggaagattttgaacaaaaaagccttg |
| | | cccttgctcttgaatacgaattcatgttcagcactgacatctcaaacttctacccatcaatatata |
| | | ctcatagttttgaatgggtattcatatcaaaagaagaggcaaagaagaaaaaaagcaaaaataacc |
| | | cagggggattaattgacagccacattcaaatgatgatgaacaaccagacaaatggtattccactcg |
| | | gcagcacattgatggatacatttgctgagcttatcttgggtcaaatcgatatagaattaagaaaaa |
| | | aaactaacgaactcaaaataataaactacaaggtagtacgctaccgtgatgattaccggatcttct |
| | | ctaatagcaaagatgatttagacataatatcaaaatgtttagtcaatgtattgggcgattttggtt |
| | | tagatctaaactcaaaaaaaactgaactatatgaagacatcatacttcattcgttgaaacaagcta |
| | | aaaaagactacatcaaagaaaaaagacataagtcactccagaaaatgctctattcaatatatttat |
| | | tttcacttaaacatccaaactcgaaaacaaccgttagatatctaaatgattttcttaggaatttat |
| | | ttaagcgaaagacaattaaagataacggccaacaggttgatgctatgcttggtattatttcaagca |
| | | tcatggcaaaaaaccctacaacgtacccagtaggaacggcaattttctcaaaactcctcagttttc |
| | | tttatggtgatgacacccaaaaaaaattaacaaagctagaacaactccataaaaaactggataaac |
| | | aacccaatacagaaatgcttgacatatggtttcagcgaactcaagcaaaaataaacctagagtgga |
| | | ataaatcttataagtcagctctatgcgtccgtataaatgatgaactcacaaaagagaaaacatttt |
| | | ctgtaaataatttatggaatattgactggatccaaggaaaagaaacaagccccaataaagccaaaa |
| | | tattatccttgctaagaaaaacaaaaatcgttgacacagataaatttgataaaatggatgacaata |
| | | taacacctgaagaagttaatctattctttaaagagcacagcaattaatatcccaaagccatgttag |
| | | taacataacatggcttttttaaatcactcattatcagttatcaagaacgaacataacattctattc |
| | | cgaggag (SEQ ID NO: 271) |
| 13 | 1 | agttaatgactattgtgagcgagaaacgcgctactactatatatagacagacaagatgcacttact |
| | | gaataaatactcataacggagaaaccagctgtatagtgaacaatagatttccagtagcatattttt |
| | | acttcacttttagttattaatatgataatcataaactacggctctgccttaaatttgtgaggttgt |
| | | ttcgcctcgaaggaactaatgttaggacatacgccaccgttcagtcgatggtaacgcttcttaact |
| | | agtggtccgctaagtgatgcgcaaagtgattgggcagagccgaaacgtttacaatccgataggagt |
| | | tggttttgtcgctacatgataaattattaatgcataacttcgcattagccaataaaaaaagccctg |
| | | acttcatatctgaacttcctcaaattgaacctaaaccatacagcaatggacataaaattaaatgga |
| | | taaaccacacacttactagcactgaagttactccccctgataacctgattaaaatatgcatattga |
| | | ttgagtcaggggaaattgctataacatcagtaagtgatattgccaatttacttggagttcctgctg |
| | | gccaattactttatatactatatcgtaaaaaagataattatcgtacttttgaaatagaaaagaaga |
| | | atggtaaaaaaagagtcattaatgctccttgtggcggtctatcgatactccaaacgagactaaagc |
| | | ccgttcttgaatatttctacaggccaaagaaatctgctcatggttttataaaaggaaagagcatca |
| | | ttactaatgctgggatgcatattaaaaaaaattttgtcgtaaacattgatctagaaaactatttcg |
| | | aatcaataagttttgctagggtttatggaatatttaaaagtaaaccttttaattttgctcatcctg |
| | | cagctactgttttagctcagttatgtactcacaatggaaaattacctcaaggtgcgtgtacatcgc |
| | | caatattagcaaatattgcatcagcttctctagacaaacagctcacccaatttgcaggaagaaaaa |
| | | aaatatcttattctaggtatgctgacgacataactttttctttcaatcagagaaatattgatataa |
| | | tcaaaaaaaacgacgacggaagttatagtcttagtgaaactatagacaatattatttcaaaaaatg |
| | | gctttaaaataaattatgataaatttagagttcaaaccagaaatacaagacaaagtgttactggct |
| | | tagtggttaatgataaagttaacattaacagaagatatataagaattacacgttcaatgattcata |
| | | gatggacagatgataagctaaagtatgcacttctctttgctacagaaaaaggatatcaggcaaagg |
| | | ataataaccacgcaattcaaattttccgaaatcatatttatggaaggcttagctttataaaaatgg |
| | | ttagagggaaagactatccaggatatttaaaactgatgtcatacatgagtcataacgatccattaa |
| | | aaacccaagaaggattgcgagcaatgaaagaaacagaaaactttgatgtttttatatgccatgcaa |
| | | gcgaagacaaaaaagacattgcaattccaatatatgacgagttaactaaacttaaaatttcagcct |
| | | tcatagatcatgttgagataaaatggggcgactccttaattgataaaataaatgcagcactagtta |
| | | aatcaaaatatgtcatcgctattttatctgctaattcagtcaataaggaatggcctcaaaaagaat |
| | | taagagcagttttagccagcgaaatatcgagtggcgacgtaaaacttttgaccttattaaaaaaag |
| | | aagacgaggaggtcgtaaacctatcattacctttacttagtgataagttttatatggtctatgata |
| | | ataatcctgaagtagtcgccaacaatattaaatcactcttacaacgataattctctcacaaaagaa |
| | | aatgtgcagattgatgcgtattaagtattaatctgcacatacaaaaaaaataataaaataatacat |
| | | ttttcataacttgtagg(SEQ ID NO: 272)t |
| 14 | 2 | cgcgctatcacgtaaaataggcaaaatacttctggaaaacagaaagttgaagtgatatgttcataa |
| | | acacgcatgtaggcagatttgttggttgtgaatcgcaaccagtggccttaatggcaggaggaatcg |
| | | cctccctaaaatccttgattcagagctatacggcaggtgtgctgtgcgaaggagtgcctgcatgcg |
| | | tttctccttggccttttttcctctgggatgaagaagaaatgacaaaaacatctaaacttgacgcac |
| | | ttagggctgctacttcacgtgaagacttggctaaaattttagatgttaagttggtatttttaacta |
| | | acgttctatatagaatcggctcggataatcaatacactcaatttacaataccgaagaaaggaaaag |
| | | gggtaaggactatttctgcacctacagaccggttgaaggacatccaacgaagaatatgtgacttac |
| | | tttctgattgtagagatgagatctttgctataaggaaaattagtaacaactattcctttggttttg |
| | | agaggggaaaatcaataatcctaaatgcttataagcatagaggcaaacaaataatattaaatatag |
| | | atcttaaggatttttttgaaagctttaatttcggacgagttagaggatattttctttccaatcagg |
| | | attttttattaaatcctgtggtggcaacgacacttgcaaaagctgcatgctataatggaaccctcc |
| | | cccagggaagtccatgttctcctattatctcaaatctaatttgcaatattatggatatgagattag |
| | | ctaaactggctaaaaaatatggatgtacttatagcagatatgctgatgatataacaatttctacaa |
| | | ataaaaatacatttccgttagaaatggctactgtgcaacctgaaggggttgttttgggaaaagttt |
| | | tggtaaaagaaatagaaaactctggattcgaaataaatgattcaaagactaggcttacgtataaga |
| | | catcaaggcaagaagtaacgggacttacagttaacagaatcgttaatattgatagatgttattata |
| | | aaaaaactcgggcgttggcacatgctttgtatcgtacaggtgaatataaagtgccagatgaaaatg |
| | | gtgttttagtttcaggaggtctggataaacttgaggggatgtttggttttattgatcaagttgata |
| | | agtttaacaatataaagaaaaaactgaacaagcaacctgatagatatgtattgactaatgcgactt |
| | | tgcatggttttaaattaaagttgaatgcgcgagaaaaagcatatagtaaatttatttactataaat |
| | | tttttcatggcaacacctgtcctacgataattacagaagggaagactgatcggatatatttgaagg |
| | | ctgctttgcattctttggagacatcatatcctgagttgtttagagaaaaaacagatagtaaaaaga |
| | | aagaaataaatcttaatatatttaaatctaatgaaaagaccaaatattttttagatctttctgggg |
| | | gaactgcagatctgaaaaaatttgtagagcgttataaaaataattatgcttcttattatggttctg |
| | | ttccaaaacagccagtgattatggttcttgataatgatacaggtccaagcgatttacttaattttc |
| | | tgcgcaataaagttaaaagctgcccagacgatgtaactgaaatgagaaagatgaaatatattcatg |
| | | ttttctataatttatatatagttctcacaccattgagtccttccggcgaacaaacttcaatggagg |
| | | atcttttccctaaagatattttagatatcaagattgatggtaagaaattcaacaaaaataatgatg |
| | | gagactcaaaaacggaatatgggaagcatattttttccatgagggttgttagagataaaaagcgga |
| | | aaatagattttaaggcattttgttgtatttttgatgctataaaagatataaaggaacattataaat |
| | | taatgttaaatagctaatgaacagccctaacgttatgaacgctaaggctgatttttcg |
| | | (SEQ ID NO: 273) |
| 15 | 3 | gctcatgttatgcatgtgcatgaaaaccactgcataaagcgggcaggcgtggcggggatacgagcg |
| 16 | | cgcgccatgtggtatggagattggatctattcataacttgatgtataaagtagaaaaaaaagcggg |
| | | gagattatgaataaaaaatttaccgatgagcagcaacaacagcttataggacatctcacaaagaaa |
| | | ggcttctatcgaggagctaatattaaaataaccatttttctatgtggtggtgacgttgctaatcat |
| | | caatcttggcgtcatcaattatcacaatttttagcaaagttcagtgatgttgatatattttatcca |
| | | gaagatctatttgatgatcttttggctggtcaagggcagcatagccttttaagtttagaaaatatt |
| | | ctggctgaagctgtcgatgtaataattttatttcctgaaagtccggggtctttcacagagcttggt |
| | | gcgttctctaataatgaaaacttaaggagaaagttgatttgcattcaagatgcaaaatttaaatca |
| | | aaacgtagctttattaactatggtcctgttcgcctgttgcgtaagtttaattcaaaatctgttttg |
| | | cgttgtagttcaaatgaactaaaagaaatgtgtgattcatctattgatgttgccagaaaattacga |
| | | ttatataaaaaattaatggcatctattaagaaggttaggaaagaaaataaagtatcaaaagatatt |
| | | ggaaatatattatacgcagagcggtttctattgccttgtatctatttactggatagtgtcaactac |
| | | cgcacactgtgtgaactagcttttaaagcgataaagcaagatgatgttttatctaaaattattgtt |
| | | agatccgttgtttctcgtctaataaatgaacgaaaaatacttcaaatgactgatggttatcaggtc |
| | | actgctttgggggctagctatgttaggagcgtctttgatagaaagacacttgaccgattgcggctt |
| | | gagattatgaattttgaaaaccgtagaaaatcaacatttaactatgataagattccgtatgcgcac |
| | | ccttagcgagaggtttatcattaaggtcaacctctggatgttgtttcggcatcctgcattgaatct |
| | | gagttactgtctgttttccttgttggaacggagagcatcgcctgatgctctccgagccaaccagga |
| | | aacccgttttttctgacgtaagggtgcgcaactttcatgaaatccgctgaatatttgaacactttt |
| | | agattgagaaatctcggcctacctgtcatgaacaatttgcatgacatgtctaaggcgactcgcata |
| | | tctgttgaaacacttcggttgttaatctatacagctgattttcgctataggatctacactgtagaa |
| | | aagaaaggcccagagaagagaatgagaaccatttaccaaccttctcgagaacttaaagccttacaa |
| | | ggatgggttctacgtaacattttagataaactgtcgtcatctcctttttctattggatttgaaaag |
| | | caccaatctattttgaataatgctaccccgcatattggggcaaactttatactgaatattgatttg |
| | | gaggattttttcccaagtttaactgctaacaaagtttttggagtgttccattctcttggttataat |
| | | cgactaatatcttcagttttgacaaaaatatgttgttataaaaatctgctaccacaaggtgctcca |
| | | tcatcacctaaattagctaatctaatatgttctaaacttgattatcgtattcagggttatgcaggt |
| | | agtcggggcttgatatatacgagatatgccgatgatctcaccttatctgcacagtctatgaaaaag |
| | | gttgttaaagcacgtgattttttattttctataatcccaagtgaaggattggttattaactcaaaa |
| | | aaaacttgtattagtgggcctcgtagtcagaggaaagttacaggtttagttatttcacaagagaaa |
| | | gttgggataggtagagaaaaatataaagaaattagagcaaagatacatcatatattttgcggtaag |
| | | tcttctgagatagaacacgttaggggatggttgtcatttattttaagtgtggattcaaaaagccat |
| | | aggagattaataacttatattagcaaattagaaaaaaaatatggaaagaaccctttaaataaagcg |
| | | aagacctaat (SEQ ID NO: 274) |
| 17 | 4 | acgtgtcttgatttaagttgacttcaagactataaagtctcaagtaacagtcggttagcttccttc |
| 18 | | atgggttggtcatgccgggttgttaagtatggctgtttgcgataagctttaaatactctttagcgt |
| 19 | | tggacggttacgtctagtcgggtgattagccagactctaacttattgaacgtattaagggttgcga |
| | | aagtgtcgcaacccgagatcgttcctctctcgggttgcgacactttcgcttcctcaagtaaagagt |
| | | gaagcccggcgcaaatgcgccgggccattttcaggtactgttatgtctgttattcgtggattagct |
| | | gcggttttacgtcaaagtgactccgatatcagcgcctttcttgtaaccgccccgagaaagtacaaa |
| | | gtttacaaaatccctaagcgtacgacgggatttagagtcattgcccagcctgccaaagggctaaaa |
| | | gatatccaacgagcctttgttcagctctatagcctccctgttcatgatgcttcaatggcctatatg |
| | | aaagggaagggaattcgtgataatgctgcagcacatgctggcaaccagtatctcctaaaggcggat |
| | | ctggaggatttttttaactcaattacaccggcaattttttggcgttgcattgaaatgtcatctgcg |
| | | caaacacctcaatttgaacctcaggataagctttttattgaaaagatccttttctggcaaccgata |
| | | aagcgtcgcaaaaccaaattgatattgagtgttggtgcgccttcttcaccagtcatatccaatttc |
| | | tgtatgtatgagttcgataatcgaattcatgcggcttgcaagaaggtggagataacatacacacgc |
| | | tatgcagatgatctcacgttctcgtctaatatccctgatgtactgaaagcagttccttcaacgctt |
| | | gaggtcttactgaaggatttatttggaagcgcgctcagacttaatcacagcaaaacggttttttca |
| | | tcaaaagcacataaccggcatgtgactggtataacaataaataatgaagagacactttcactcggg |
| | | cgcgatagaaaaagatttatcaaacatctgattaaccagtataagtatggactccttgataatgag |
| | | gataaagcttatctgatcgggctgttagcatttgccagccatatcgagcctagtttcatcacacgg |
| | | atgaacgaaaaatactcattagaactcatggaacgcctgagaggacagagatgaccaagcaatatg |
| | | aaagaaaagcaaagggtggaaatttactgtcagcattcgaactttaccaacgtaatagtgataaag |
| | | cgcctggtctgggtgaaatgttagtgggtgagtggttcgaaatgtgcagggattacattcaggatg |
| | | gacatgttgatgagtcaggaatatttcgtccagataatgcgttctatcttcgccgcctgacgttaa |
| | | aggattttcgccgtttctctcttctggaaattaaactcgaagaagatctgacagtcattattggca |
| | | acaatggtaaagggaagacaagtatcttatatgcgattgcaaaaacgctgagttggttcgtcgcga |
| | | acatcctgaaggaaggtggtagtggacaaaggttaagcgaaatgactgacataaaaaatgacgctg |
| | | aagacaggtattcagatgtcagtagcactttcttctttggcaaaggacttaagagtgtgccgatca |
| | | gattgtcacgctcagcccttggtacagccgaaaggcgggacagcgaggttaagcctgccaaggatt |
| | | tagctgatatatggcgagtcatcaatgaggtgaatacgatcaacttgccgacgttcgctctttaca |
| | | acgttgagcgatcgcaaccgtttaaccgcaacataaaagataataccggacgcagagaagagcgct |
| | | ttgatgcctatagtcaaacgctcggtggcgcaggacgtttcgatcatttcgttgagtggtacattt |
| | | acctccataagcgtactgtatcagatatctcaagttctattaaagaacttgaacaacaggttaatg |
| | | acttacagcgtaccgttgatggcggtatggtttcggtaaaatcacttctggaacagatgaagttta |
| | | agcttagtgaagctatagaaagaaatgatgctgcggtttcctcgagagtgttaactgagtctgttc |
| | | aaaaaagtattgttgagaaagcaatctgctcggttgtccctagtatcagcaatatatgggttgaaa |
| | | tgataacgggttctgatttagtcaaagttacaaatgatgggcatgatgttactattgaccaattat |
| | | ctgacgggcagcgtgtatttctgtcgttggtggccgatcttgcgcgaagaatggttatgctgaatc |
| | | ccctgctggaaaatccattagagggacgtggcattgttttaattgatgaaatagaacttcaccttc |
| | | atcctaagtggcagcaggaagttatcctgaacctgcgcagtgcattccctaacattcaatttatta |
| | | ttacaacacacagtcccattgttctttctacaattgagaaacgctgtattcgtgagtttgagccca |
| | | acgatgatggcgaccaatcattccttgattctcccgatatgcaaacaaagggaagtgagaatgctc |
| | | aaattcttgagcaggtaatgaacgtacattctacaccgcctggtattgctgaatctcattggttag |
| | | gtaattttgaactattgcttttagataattctggagaacttgataaccactctcaagtgctttacg |
| | | accaaatcaaggcgcactttggcatcgatagtattgagttgaagaaagcagatagccttattcgca |
| | | ttaataagatgaagaataaactgaacaagataagggccgagaaggggaaatagtaatgagagagtt |
| | | agcccggctggagagaccggagattcttgaccagtatatagccggtcaaaatgactggatggagat |
| | | tgatcagtctgcggtatggccgaaattaactgaaatgcagggcggattttgtgcctattgcgagtg |
| | | ccggttgaacagatgtcatattgagcatttcaggccaaggggaaagtttcctgctctgacgtttat |
| | | ctggaataacctgtttggttcttgtggcgattcaagaaaaagtggcgggtggtcacgttgcggtat |
| | | atataaggacaatggtgctggcgcctacaatgctgatgatcttataaaacctgatgaagaaaatcc |
| | | tgacgactacctgctatttctcactactggagaggttgtaccggctatcggactcacggggagagc |
| | | gcttaaaaaagcgcaggaaactatccgtgtttttaacctgaacggtgacataaagttgtttggcag |
| | | tcgcagaactgcagtgcaagcaatcatgcctaatgtcgaatatttgtatactctactcgaagagtt |
| | | tgacgaagatgactggaatgaaatgcttagagatgagctcgaaaagatagaatctgatgaatacaa |
| | | aacggccctaaaacatgcatggactttcaaccaagagttcgcataatcctaaa |
| | | (SEQ ID NO: 275) |
| 20 | 5 | gtccttaaacacgacaaaacctgtgatacttaccatggattcctctatgaaggaaaggtagtatag |
| 21 | | ccattttgggtgatacatacagtgaatgtcattgctgtagttgaagtgagtaagagcgcttaagat |
| | | taagttgagagaaaatgaaactacttgataaaaagtattacaacctcgagcccaaatatgagtacc |
| | | ttaaggactcatttattttaggactggcatggaaaaaaacagatagttttgtaagaactcacaatt |
| | | ggtatgcagatattttagagctggacaagtgtgcgtttgatattagtgatgaagtcactaattggt |
| | | caaacgagatctcaaagaacgctctttccaaaagtgatattgaattgataccggctccaaaaggag |
| | | caagctggttcattaatcaaggtaaatggactaccaataaagataatagaaagataaggcctttgg |
| | | ctaacatatctattagggatcagtcttttgctacagcagtaacaatgtgccttgctgatgctatag |
| | | aaacaagacagaaagactgttcgttgagcaatcttggctatgctgagcatgtaaagaacaaggttg |
| | | ttagttacggaaataggcttgtctgcgattgggacaatgaaagggcaagatttcgttggggaggaa |
| | | gtgaatattataggaagttctcttccgattatcgaagctttctacaaagacctatctatataggca |
| | | gggaaacagtaaataaagttagcggaattgatgatgtatatatcatcagtttagatctgaaaaatt |
| | | ttttcggttctataaaaataaaccttctgttagaaaaaatcaaaaaaatatccgctgatcattatg |
| | | cagctaaattcataaatgataatgaattttggactttggcgaatcggattttaagttgggattggc |
| | | ctgaagaatctttatctttacttgagagtttggatataaaagaaaaaaatgttggtcttccccagg |
| | | gattagcttctgctggtgctctggcgaatgcatatctcattgagtttgatgaatctttaatttcta |
| | | agcttcgtactaagatagaagacagccaaataatactgcatgattattgtcgatatgtcgatgata |
| | | ttagattagtgatttcaggagaagcactagaaagtaataagattaaggaatctattcatgcattag |
| | | ttcagggcattcttgatgagacattggctcaaaatccgtcagataatgaaccatatttaaaaatta |
| | | acgatagcaagacttatattcttgagctttcagacattgacaacggaagtgggcttacaaatcgaa |
| | | tcaatgaaattcagcatgaagtaggagcttcgagtatcccagagcgtaacggactcgataataata |
| | | tcccggcacttcaacaattattactgaccgaacaggataatttttccgaggatgttgatagtttat |
| | | ttcccgggtttaaaaatgataagtcgataaaggtagaatctgtacgtagattttctgcccataggc |
| | | tggaaaaaagtttggctaaaaaaagcaagctaatttcacctgaggagaggaaacaatttgataatg |
| | | aaacctcactgattgcaaaaaaattattaaaagcttggctaaaagatccatcaattatggttatct |
| | | tccgcaaagcgatagctatcaatcctaatctagatgcttatagcaccattcttgaaattatttttt |
| | | caagaatacaacgcaatcgtgataaacgagataaatatataatgctgtatcttctttctgatatat |
| | | ttcgtagcgtcattgatgtctatcgaaacctagaatcagaatacgtcgacgattatcaaaaattga |
| | | tgggtgaagttacattgtttgcccaaaaaatactttcctgcaaatcttttattccaaattacgcat |
| | | atcagcaagcattattttatctcgcagtgatcaataaaccatttatagctagtaataaagcttctt |
| | | ttgatcttgcaaggcttcaatgcgtcttaattaaacagcatttagaaccgttgaatagtagtgatg |
| | | gatacctatttgaggtatctgctcaaatcagtaaagactaccgagcaaatgccgcttttctacttt |
| | | ctcatacaaatagtaacaaagtagtagacttaattatcgaaaaatttgctttccgaggaggtgaat |
| | | tctggaatgcaatttggaaagaaattgttaggatgcaagataaagataggattaacgaatttagat |
| | | gggccatatcaaaatatgagtcaaagccaaatagttcggagcactatctttcatcagtgatcagtt |
| | | tcaaggaaaacccatttagatatgaacatgcgcttctcaagctaggtgtagcattagttgaactct |
| | | ttgatgatacagagaaaaacgtatggcaacctgatggtaagcagtattctccacatgaaataaaag |
| | | taaaattagaaggtaactcaacctcatggggtgaattatggcgtccaaattttagtatttcatgct |
| | | cgatagataagaaaggtgaacctggtaaagacccacgctatataagccctgagtggttggcaaatt |
| | | atccacagactcaaaatgatgaacaaaaaatctattgggtttgcagtgtgctaagaagtgctgctt |
| | | taggcaatgtagattatactcaaagaaatgatttaaaacttgataaagctaagtatgatggtatcc |
| | | attctcagttttacaagcgacgtatgggaatgttacatacaccagagtcaattgttggttcatatg |
| | | gaactataacagattggtttgcaagttttcttcagcatggattgcaatggccaggtttttcttctt |
| | | cgtatataagccaagaagatatattgtcaattactaatattattgagtttaaaaactgtttattgg |
| | | aacggctaggctacttaaataagcagatatgtatttcatcgaatgttccaaccttaccgactgttg |
| | | tcaacaggcctgaattagcatctaaccattttagaattgttacggttcagcagttatttcctaagg |
| | | atactaatttccatccttctgacgtgactttggctaatcccgatgtgcgctggaagcacagagagc |
| | | accttgcggaaatctgtaagctaacggagcaaactttaaatgcaaaacttaaaactgagtctaggg |
| | | aacatacaagcacagctgatctaatcgttttttctgagttagcagttcacccagaagatgaagata |
| | | tagttagagcactggcatttagaaccaaagccatcattttttccggctttgtcttctgtgaacaag |
| | | atggccgaatagttaacaaagctcgttggattattccagactcttcagagtctgggacccaatggc |
| | | gtgtccgtgatcaggggaaacatcatatgaccagtgatgaagtggctcttggcattcaaggatata |
| | | gaccatcccaacatattatttcaattgagggtcaccctgagggaccatttaaattaactggtgcga |
| | | tttgctacgatgcaacagatataaagcttgcggcagatctgagagatttgactgacatgtttgtca |
| | | ttgcagcatacaataaagatgtagacacatttgataatatggcttcagcactacaatggcatatgt |
| | | atcagcatattgttattacgaatacgggagaatatggaggctcaactatgcaagccccgtacaaag |
| | | agaaatatcataaattgatttctcatgctcatgggactggtcaaatagcaattagtactgctgata |
| | | tagatttagcagcattcaggcggaagctacaaatatataaaaagaccaaaacccagcctgctggat |
| | | acaatagaaaacattaaggatttttatggatactttagttaagttagctacaattatttctccatt |
| | | aattagtgctggagtagctatttgggcaattttggttgctaaaaaaaccatcagtgaaagcaaaga |
| | | aattgccaagaaaaccatcgctgatacggcctaccaagcatatttgcaattagccatggagaaccc |
| | | acaattttcgaaaggctacagcgcagattgtagacaggagcgagaccctatgtatgatcaatatgt |
| | | ttggtacgtggctaggatgatattctgctttgagaaaatcatcgaggttgaagtaaacttaaaaga |
| | | tagttcttgggcaaatacgttggaaaaacatttgaagtttcattctgaacattttaagaaaacgaa |
| | | tgttgtcgaagaggctctctatattccccctattttggatctcataagatgtgcagctaactaata |
| | | acttatcccaataggattatattccacacgataagcccactggaaaatgtaacatcccaagatagt |
| | | ttttgggattgtttcccagtgggcggaaagtatcatgatagttgtcacccccggtggagctgcaaa |
| | | gatttttatggggtgggtgttacattgcg (SEQ ID NO: 276) |
| 22 | 6 | acacgatataaaaccatctcattgcttgctgggttaactgagttgctgaatttttttctagaattt |
| | | cgcaaaatttaataggtaaaccttgtttttttaaatttacgatgatataaaaataatgccctaaac |
| | | aaaggtttaggggtattgtacaggttgtcaagcctcccacaggtcttggtgaaaccaatcactgtg |
| | | acgacggtaagcaacacttggatgatattcataattgactccacgctactgattacattatacagc |
| | | atatctaacatttgcggcgaggttcacaatttgtatttaggtactgattgtggatgagaaggttgg |
| | | agaaagaccacttggttaagccggaggatgtgtcctagaattgtcgctattctgtcatcctccggt |
| | | tttgctaatttcattcagggaatataatgaataatgatgattacccatggttcagaaaacgtggtt |
| | | atttgcatttcgatgaacctgtttcattaaaaaaagcggttaaatatgtttcctctccagaaaaaa |
| | | taataaaacattcttttctgccatttttaagctttgaagtaaaatcgtttaaaatcaaaaaagaca |
| | | aatcaacaaaacaattaagtaaaactgaaaaattaagacctattgcctattcctcacatttggata |
| | | gtcatatttatgcattttacgcagaatatcttactggacattatgaattattgatccaagaaaaca |
| | | atttacacgagaacatccttgccttcagatctttaaataaaagcaatatagaatttgccaagagag |
| | | catttgatacaattactgaaatgggtgagtgtagcgctgttgcattagatctttctggtttttttg |
| | | acaatttagatcatcaaattttgaaacaccagtggtgcaaagttattgggactgaagcgttgccgc |
| | | aagaccattttgccatatacaaaagtataacaagatattctaaagttgataaaaatagagcgtatg |
| | | agattttaggtatatcaaagaataaccccaagtataatagacgcaagatctgcacccctgttgatt |
| | | ttagaaataagattagaaaaaatggtcttattatagttaataattcccaaaaaggtataccccaag |
| | | gctcgccaattagtgctctactttcaaatatatatatgcttgactttgatattgaaatgagagatt |
| | | acgcgcaggaacgtggtggccattattatcgctattgtgatgatatgctattcattgtaccaacta |
| | | agtataataaaactctagcaggtgatgtagcccagcggattaagcatcttaaggtagaactcaata |
| | | ctaagaaaactgagattcgagattttatatacaaagacagtaccttagtggcaaatatgcctttac |
| | | agtatcttgggtttatttttgatgggagtaatatattattacgttcatcttctctcgcaagatatt |
| | | cggaacgaatgaaaagaggtgtccgcttagcaaaagctacaatggacagcaagaataggattagag |
| | | aaaataaaggtgaagctttaaaagctttatttaagaaaaaattatatgccagatattcacatattg |
| | | gaagaaggaattttttgacttatggttatcgcgccgcgaagatcatgaattcgaaagctataaaaa |
| | | gacagttaaaaccattgcagaaaagattggaaaatgaaatactaaaataaatatttgctggcccga |
| | | atcatacagggccacaatacagttgaaaacaagctataataaacaacatctaatttttatatac |
| | | (SEQ ID NO: 277) |
| 23 | 7 | tctcaacttccccaaatgtccgtattcatccataaataccctgatttataacaattttaccgtttt |
| 24 | | ttagtccatcatcgtccgcagccatccagtagaatccgataaagaatgtgtataggattgtgtata |
| | | tgttcctgttcggtcatggattcctatacacatgcctttaaacgatatgcagattcgccgcgctaa |
| | | gcctgaagataaaccctatacgcttggggatgggcaaggcttgtcattgcttatagaacctaatgg |
| | | aagcaagagctggcggttccgctatcgctatgccggtaaacccaagatgatctcgcttggcgttta |
| | | cccaacgatcactcttgccgatgctcgttcccgtcgtgatgaagctcgaaaacttgtggcagaagg |
| | | aaagaaccctagtgatgttcgaaaagagcaaaagctggctctgcaagcagagtcagagaacgcctt |
| | | cgaaaagatagccagagagtggcatcaacttaaatctgctaaatggtcggcaggatatgcatcaga |
| | | catcatggaagcgtttaagaacgacatttttccttatgtgggaacaaggcctgtgagtgagattaa |
| | | accgctagagctgctgaacgtactgcgtaaaattgagaaacgtggtgcgttggagaaaatgcggaa |
| | | agtgcgtcagcgttgctctgaagtgtttcgctacgcaattgcaacgggtagagcggagtacaatcc |
| | | tgcggcagatctttccagcgctctcgaagtgcaccaatccaatcatttcccgttcctaaaagctga |
| | | tgagatacccgaatttctgcgtgccttagagagttacaccgggagtaagcttgtccagatagcaac |
| | | gaaattactgatgattacgggcgtgagaaccatcgaattacgcgcggcattatggcaagaatttga |
| | | tctggataacgctatttgggaaattcctgctgaaaggatgaaaatgcgcaggccgcatcttgtgcc |
| | | attgtcgacccaagcgttagatttactccatgaactcaagataatgacagggaactatcgttatgt |
| | | ttttccaggacggaacgatccgaacaaaccgatgagcgaagctagcataaatcaagttatcaagcg |
| | | tatcggttacgaaggccgactcactggtcacgggttcagacatatgttatcaacaattttgcatga |
| | | agaaggttttcaatcagcatttattgaagtccaattagctcatgttgatagaaataatataagagg |
| | | aacttataatcatgccatataccttatggaaaggcagaagatgatgcaatggtacagtgattatct |
| | | tcgcaaaaaaaaggggttataatatgttaaaccagtcattttccgtttcgaacttaattaagcttt |
| | | taaaaaaaaccgatccaaaaagatacaaaattggtaggaattcagctgaatataaaaaatatatag |
| | | ctgataaagttaatggctcaattgaaacatactcatttggttcgatctcaaattcaagaattaaca |
| | | acaaaaatgtgtatatatttaaagattttatggatgtacttgtcgccaggaaaataaatgataaca |
| | | ttaagcgtgtgtatagtgttaaacaaaacaacagacatgacatcataaaaaaagtaaatacagtgt |
| | | taagtgagcctgtaaattattatatttacaggctggatattaagagtttttatgaatcaatagata |
| | | aaaatatcgttttccaaagaattaataataacccgattatttctcataatactaaaaaatttatca |
| | | atggtctttttaaacataacgctttctctgcaaataacggacttccccgtggtatgggattaagtg |
| | | cgactttatcagaaatatttatggaggaatttgatgctgagttggcgaggctgcctgaagtatttt |
| | | atgcttcaagatatgtggatgatatcatagttttttcattctataaaataccagattataaaaatt |
| | | atttttcaaggattttaccaaatggattacatttaaatgaaagaaagtgcagtgagtataccatag |
| | | aggacacttcaactaaacattctgaaattgagtttttgggatattcatttattatacaccatggat |
| | | taaaaaatcagcgtcgtcatgttgtgatcagaatttcggaggagaaaataaagaaaataaaaagaa |
| | | ggattgcacttgcggtaaaagattactcaaataattctgatgcagaactcttgaagaaaagaataa |
| | | agtatttaactggtaatatattagtaaactccaatagtaataaaactgatgctttatatagtggaa |
| | | tttattacaattatcaacatttaactgataaaacacagctcaaggaacttgatatatttaagaata |
| | | ggatgctattttcttcaaagggcgaggtggggagaaaaattttagcagcaggtcacaacttattaa |
| | | ctgcgcctaaaaaatactcatttttggctggttttgaaaaacggctactgtcttcttttaaacggg |
| | | aagatattattaaaataaataaggtttggtgattcatgaaaattaaaatatcgaagagtgattata |
| | | aaagagtacttctcacggatattttaccatatgaagtccctatccttttttctaacgaaggtttct |
| | | ataagttaatttctgaaaataaagttttacccggaacattttcagaaggccttaagctggattctt |
| | | ataccatcccttactcctataaaataaaaaaggggctggcgagttctcgaagccttggcattatac |
| | | atccttcaacgcagttaagaatctgtgatttttatgataagtatgaacatttgatggttcatatgt |
| | | gtacaaaaagtccgttttcgctacgttatcctagcaaaatagggagctattattacgaaaaggact |
| | | tcttaaaaagtagaataaatctaaaagatggtcttgtacaatttcataatcatggctttgattccc |
| | | aagaaacttcctcatcttcccatttttcatataagaaatatcctttcatctataagttttatgagt |
| | | catatgaatttcatagattggaaaggaagtttaggaaacttttaaagcttgatattgctaagtgtt |
| | | ttagtcatatatatacacacagcgtttcatgggctgtaaaatctaaagaattctctaaggttaata |
| | | gaacttataacagctttgaaggttgtttggataagctttttcaagatgccaattatggtgaaacaa |
| | | atggcataataattgggcctgaattttcaaggatatttgcggagattatattacagcgcgttgact |
| | | tgaatgttgagtctcatttgaatcttgagccaggcatagttaaagataagagctatgctataagac |
| | | gttacgttgatgattattttatatttgcggatgatgatgaaacatttaagctaatagaatttgtac |
| | | tggcaaatgaactcgaaaaatataagctttatttgaatgaatctaaaaaggaatttatcgagaggc |
| | | cattcgtgactggagctacgatggctaaaaatgatattgcagaaatcattgaggatttatatggat |
| | | cgttaatccatactgagaagttggatgagttaacagctatggttaatttaaatccagacgtcaaaa |
| | | ttcagcctgaaaatatgaatgacctttttccattgaaaggtgtgtggaataaaaagctacacgcgg |
| | | acaaatttataaaacgaatcaaaattgcggttagaaaaaacaataccacatttgatcttgttagct |
| | | catacttattaagtgcgattaagagtaagtttttcaaagtaattaggctgttgaggatgttcgatc |
| | | tgtcaggaaaagaagatataacttataaattcttctcaatattcaatgaggtgattttttttattt |
| | | atgctatggattttcgagtccgacagacatacataattagccaagttattttggaaataaattcat |
| | | ttgctaataagcaagcttcagacattagtgaagttataaaaaagaatacttttgatgagcttctta |
| | | tgtgcatgaaaagcatgggtaatattcatgagaggccagtggagttatctaacttacttatatgta |
| | | tgaaaggtttgggggagcagtataaactcaatccagatgaatttaaggatttgttgggtattagtg |
| | | agaatgagtgtttttacgatttagaatatttttctatatgcagcatgttacactatataggcgatg |
| | | atgttctctatctaaaaatgaaagaagatattgtccttgctatacagagtttgataagtggtcgga |
| | | acgatataaaaaaagacactgaaacatttatgctattccttgatatgatgacgtgcccatatctta |
| | | cagttaagcataagagaataatttatagaacatatgtcgaagcaaatacaggtcaaaaaagattta |
| | | cgaatgcagtaattgattctgaaattgattctttaaaaaataatgtaatcttttttaactggtctg |
| | | gagatgctgatcttgagcacgttctttataaaaaagagttgcgaacagcatatgaatagtagtatt |
| | | ttaatttcgttaaagggttgcgatgcctaaggtttcgacctgaagcagataccggaagatcggctt |
| | | ttgaatgttcatccgaaagatattcgcgatacgttttgaggatggaccgatttagacacactattg |
| | | ccttttagctaaacaggccgcgaaagcggcctttttaatgaatcagatttcccctcaccgatctca |
| | | atacttcccctcagcgtgcgcagccccgcccgcctgcccgcttcgcttaacagactggttttcatg |
| | | caccccttaaatcgtctcagaagccaccacacaagggctttcgcgtcaaaaatggcgcatgagact |
| | | catgcgttttcatgcgccatagatatgcactcatacgctctcaggccagctagggaaaaagcgtaa |
| | | aaaatcccggtactggaccgagacttcgtgggcgtattttgctaa (SEQ ID NO: 278) |
| 25 | 8 | agcatcggagcaaagtaactcaataccgaacaataaatatgagcccttcgtgaaaccgggtaaggt |
| | | caaactcataaaccaacaaaaggggaaaagtgggatatgtgaggcgtgtatgatttttatttattg |
| | | ggcttcgttaaaaatggtgatttaatagccctttaaatttatcactttttaactaactccgagggt |
| | | ttatggtcatttttgacgagaagcgacacctgtacgaggcactgctgcggcataactacttcccta |
| | | atcagaaaggctctatttccgaaatccccccttgtttcagctcccggacctttacaccagagatcg |
| | | ccgagctgatctctagcgatacctccggccggagatctctgcagggctacgactgcgtggagtact |
| | | atgccaccaggtataacaatttcccacgcacactgagcatcatccaccccaaggcctactccaagc |
| | | tggccaagcacatccacgacaattgggaggagatcaggtttatcaaggagaacgagaacagcatga |
| | | tcaagcccgatatgcacgccgacggcaggatcatcatcatgaattacgaggatgccgagaccaaga |
| | | caatcagggagctgaacgacggattcggcaggcgctttaaggtgaacgccgatatcagcggctgtt |
| | | tcaccaatatctattctcacagcatcccttgggccgtgatcggcgtgaacaatgccaagatcgccc |
| | | tgaacacaaaggtgaagaatcaggacaagcactggtctgataagctggactactttcagcggcagg |
| | | ccaagagaaacgagacccacggagtgcctatcggaccagccacatcctctatcgtgtgcgagatca |
| | | tcctgagcgccgtggataagaggctgcgcgacgatggcttcctgtttcggagatacatcgacgatt |
| | | acacctgctattgtaagacacacgacgatgccaaggagttcctgcacctgctgggcatggagctga |
| | | gcaagtataagctgtccctgaacctgcacaagaccaagatcacaaatctgcctggcaccctgaacg |
| | | acaattgggtgtctctgctgaacgtgaatagcccaaccaagaagcggttcacagatcaggacctga |
| | | acaagctgagctcctctgaagtgatcaacttcctggattacgccgtgcagctgaacacacaagtgg |
| | | gcggcggctccatcctgaagtacgccatcagcctggtcatcaacaatctggatgagtataccatca |
| | | cacaggtgtacgactatctgctgaatctgtcctggcactaccccatgctgatcccttatctgggcg |
| | | tgctgatcgagcacgtgtacctggacgatggcgacgagtataagaacaagttcaatgagatcctgt |
| | | ctatgtgcgccgagaacaagtgcagcgatggcatggcctggaccctgtacttctgtatcaagaaca |
| | | atatcgacatcgacgatgacgtgatcgagaagatcatctgctttggcgattgtctgtccctgtgcc |
| | | tgctggatagctccgacatctatgaggagaagatcaacaatttcgtgtctgatatcatcaagctgg |
| | | actacgagtatgatatcgaccggtactggctgctgttttatcagagattctttaaggacaaggccc |
| | | caagcccctacaacgataagtgtttcgacatcatgaagggctatggcgtggacttcatgcctgacg |
| | | agaattacaagacaaaggccgagtcctattgccacgtggtgaacaacccctttctggaagacggag |
| | | acgagattgtgagtttcaacgactacatggctatcgcatgacttttaggcctcatt |
| | | (SEQ ID NO: 279) |
| 26 | 9 | aagtgaacggatgtatattgagtgcaatgtgattaactatctgttgttacaatatttagataggtg |
| | | ataaaatatgacatctaccattgatttttatgaatctgatttctcagccacattatacccattaaa |
| | | aaccaatcaaatattactcaagcatcactcacaagagatgtcagaatatatttatcagaaggtcat |
| | | taatcctgcatatccaacagatagttttctgtctcagcaaaaagtcttttcgactaaacctaaagg |
| | | tcatttgagacgaactgtaaaattagatccagtagctgagtattttatttatgatgttatctatcg |
| | | aaacaggaagatatttaggccagaagtaagcgagtcgagaaaaagctttggatatatttttaggaa |
| | | cggtagcaggatacctatccacgtttcctataatgaatataaacaaagcttaaaaaaatattctga |
| | | gctatattctcacagtatacattttgacatagcatcttattttaatagtttatatcaccatgatat |
| | | aatccactggtttagctcaaaagaaggagttagccctgcggatgttgaagctctcggacagttttt |
| | | tcgcgaaattaactcaggacgaagtatcgattttatgccccaaggaatttatccggcaaaaatgat |
| | | cggtaatgagtttctaaaattcgttgatttacatggtcgcctaaaatctgctcaaatagtaagatt |
| | | tatggatgactttactatttttgacaatgacattgaaacactaaataatgatttcatcagaataca |
| | | gcagttattagggcaagtatccttaaatataaatccgtcaaaaaccacatttgacaatgtgatggg |
| | | agatgtgaatgaaaccttaactcagatcaagtcatcacttaaagaaatcattacggaatatgaaca |
| | | tatacctacagcctcaggggtagaggtagtcgagactaatattgaaatcataaagcaccttgatga |
| | | tgaacaagttaacaaattaatagacttgctaaaagatgaaaaaatagaagagtctgatgccgattt |
| | | aattcttggttttttgagaactcataatgatagtttactttctcagatgccaatgctattaggcag |
| | | attcccaaatttaataaaacatatttatacgatctgttcaggtattaccgataaatcaggattagt |
| | | aaaaatattgctcagctatttaaatactaataataactttttagaatatcaattgttttggattgg |
| | | agcaatagttgaagactatctattaggtgtaggtgagtatggctccgttttacacaagttatatga |
| | | gttatctggtgattttaaaattgccagagcaaaagtattagagataccggaacagggttttggttt |
| | | caaagaaataaggaatgaataccttagaaccggacaatcagattggttatcatggtcttcggctat |
| | | cggtacgagaaatcttaaatcagcagagagaaactatattcttgattatttctcaaaaggctcacc |
| | | aataaattatcttgttgcatcttgcgtcaagaaactttaatttaaaagccaccttcttgaaaggtg |
| | | gctttaaaaaatacctttagttcc (SEQ ID NO: 280) |
| 27 | 10.A | gaggatttatgcacaaaatcctgatgcgaaatgttttcaaaaattgtcaggttaacgttcctgcag |
| 28 | | atctttgcgttacatgtcatttctggatcctttcccgacaggttaggttgtgattgatatgatgcc |
| | | catctctcattttagtgatcgttatccctttataaacaggagtttatatgttatctatatgcaata |
| | | gacttaaatcgatatacgtgcgcagcttacgattcacctctctacttactatttaaggaaaagagt |
| | | gaggggagaattgattttcattaagatattatgagagaattatgactagtgaaatagtgttaaatc |
| | | ttgatttcccagaatataaggatgatttttgtactgatagcattgatgagcaagataatgagttgt |
| | | ggcagcaacaggccaataaaaagctactttcgtttctcgaggtgatgggggaggaagcaagacgat |
| | | ataaagaaaataattcccgtagtacgcatccacattataagacattgagtagttatcaccatgcaa |
| | | tctttatcagtggcgcgcggggggcggggaaaactgttttcatgagaaatgccagatttagctggc |
| | | aaaaacattataataaagatctaaaacgccctaagctatattttattgatgtgattgacccgacgc |
| | | tattgaatattgatgaccgtttttctgaagtcattatcgcttcaatatatgctacggtagaaaagc |
| | | ggatgaagcaacctgatattgcgcagaatatcaaagataattttattaattcgcttaagacgttgt |
| | | ccggtgcattaggtaaatcaaaagattatgatgaatataggggcattgatcgtattcaaaaatatc |
| | | gttctggaatccaccttgaaaaatatttccatcagttcttgatttcaagcgttgagttactggatt |
| | | gcgatgcgctggttttgccgattgatgatgttgatatgaaaatagataacgcttttggtgttctgg |
| | | acgatattcgctgcctgttgtcatgtccattagttctaccattagttagtggggataatgatcttt |
| | | atcggttcattgccaaaagtaaatttgaggaattattaaatcgtaaagcaaactctaattatgcta |
| | | aagaaggcagcgagatagcagaaagattatcagaagcatatattactaaagtattccccagccatg |
| | | tgaagatacccctccaaccgatagatgagttgttgccatatctttatatacattctaatgaagatg |
| | | aaaataaacaacatacaagctattctgaatttatcaaacttgtacaacaaaaattctactttcttt |
| | | gtaatgggcaagaacgaagcacaaattggccgcagccgagaagcgcacgtgaagttacgcaactaa |
| | | tccgttctttacctccgtctactcttagtaaggaagatgattcgggaactgatttatggcaacgct |
| | | tcgctgtctgggcggaagaacgtcgcgatggattagcattaaccaatgttgaatcttatctgttta |
| | | ttaagaatgcgaaagcagtagaagatttaaatctgtcaaatcttattgcttttaatcctttactgc |
| | | aaaaaggaaaatatccctgggcagaaaaggatttttataaacagcagtcccaacgtcggaaagagc |
| | | tcaatgcccccgaaacaaattcaggtatccttaataccgtattttccgaacaaaggaaagatttta |
| | | ttttaagaagtatgcctgcgctggaactcattatggagcctatgtatgtcactaagacggtagcag |
| | | aaaaaaatgataattctgcgcttatagcgatctatacccattctgattattacagccagcagcaga |
| | | acagacgatgtcatatattttttggcagagcttttgaaataatgttctggtcagtattagcgaaaa |
| | | ctgaaaatcttccacaagaattttatgaaaaagataagtttaaatctttatttggtaatattttca |
| | | aaaaagtaccattctactcaatattttcaatgaaccctacaaaggttgttgatgaagaaaatgacg |
| | | atggcagtgaacctgatttttcgcaaaaactggacgatagcattaatgaactggtggaagatatat |
| | | atatctgggcaaccagtaataaattgcgagccttcaaaaataaaaatttaatacccttaatgacgt |
| | | gcgtttttaataaggtattttcacagatcaatgtactgagaaaaaacgtgcaggacagagttaaat |
| | | ttagagatgaacatttgtcagatctggctaagcgatttgagtatatgtttattaatgctatcttta |
| | | ctttcatcagagaaggggtagttgtcaataccaatgtggcaacaggcgcagctcctgccagagtac |
| | | gtaatttatcagagtttaataggtatgataaaacattatccaggaatatgtccgggattttatccg |
| | | tgaaagaggataatggcttaacgatagtcaaagagagtgagggcgatatcgcagatctgttatttg |
| | | aaatttggcatagcccattatttaaattaacaaccaggacatgttacccaataggtaaaataaatt |
| | | cgcaaaatacggcccaggaaaatttatcatcagattttaattcattttttgaaaatggtatcaact |
| | | tcgaattgataaaacaatattattggcaaacttcaaatcatgataatatcaggacagcagacgtta |
| | | gggaatgggcaacttcacgtcttaatgaagcaatcatccttttttcatggatgaaagaaagcaagt |
| | | ctattaaagcgaaaattgacggacagagctacgagggtcggctctttcgcgggcttcagcaggcgc |
| | | tggaaggttatgaggaggtctgagtatgtttaatcaggatccttattggctcattcctaccctttg |
| | | tctggcatcagaccgaattttttatgcacaattgcgagaccacttaggccagaaaagtagcggtga |
| | | acgcaaaaaagaaaaaaatggatatatactggtacaggcggcacaagactatcaattctattttgg |
| | | cggccgtattcggaaagaggatgtgcaaaataatgccttaatgtggcagatagaaactggtaatga |
| | | aaattgcttatcgatgcttgatagtttgtcagcatatttcctcacatggcgcggcaattgttttga |
| | | ggtcaggcgtgagcgacttgaaccctggctgatgatctgttccgtgatagatcccgcatggattat |
| | | tgcctatgcataccaacaattgattaaacaaaatgttgtatgtgatagtgagcttatttctttgct |
| | | gacagaacatcaatgtccatttgcctttccaaaaggcagaggggacatttcctttgctgataatca |
| | | tgtccatcttaatggtcatggttatagttcaatttcaatgctgaactttatagatggaaattataa |
| | | ggttaaaaaagggataaaatggccctatcggcaggaatacaccctctttgaaagtggtcttctgga |
| | | taaaaatgatcttccccgctggctgtccgcttatagctcttgcttacttaaaaatgtatataattc |
| | | atttcaacaaggaaaaagatccgaggtagatttcacatgtctgaaggatgcggtcgaaacggtgct |
| | | tgcggatgaggataaatattattttttagaggtagcttcgctatatgatgttgtcaccttgcagca |
| | | aagagtgctttatgaagccgcccagcagaaatatcactcacatcaacgttggttactgtatacttg |
| | | cggaataatgttaggtacagaatctgaagattatgcgaatgcgctggctaacctgatccgaatcag |
| | | caatattctaagaaactatatggttgtatctgcggttggattgggacaatttattgattttttcgg |
| | | cttcaactatcgtcgaataacaaagccagctgatacaaacaaccgagttcattatgattcttctgc |
| | | tggtatttccagagaatatcgtgtctctcctgattttgtactgggtagcggcgtaatgcctgatat |
| | | atatgccaggcaacttttcgatttttattgtacccaagcacgcaagggcgtacccgaacaaggaca |
| | | tattgttgttcattttacacgttcctttcctgacaaaaaatcaacatatgataaattgctaaccga |
| | | gtgtcgcgaacggttacgttctcagtgtgattattttggccgttttttaacatcgcttactttgca |
| | | gtcgatagaatataaaaatttatctactgatgaagatcgaagcatagacattagaaaattagttcg |
| | | tggctatgatgttgctggaaatgaaaacgagctacaaatagaggtatttgccccggttctccgggt |
| | | actgcgtgctgctaaatttaaaggggagggggtgaactttaaaaggctacagcgcccttttattac |
| | | tgtacatgctggtgaggattattgtcatatactcagtggccttcgggctatggatgaagccgttga |
| | | attttgtatgttaggagaaggcgatcgtatagggcatggattagctctgggagtagatataaaact |
| | | atgggcgaatcgccaaaagcgagcatacctgacggttggacaacatcttgataatttggtttgggc |
| | | atatcatcaggcagtattactttctcaacatattgtcgagcatataccagtaatgcatgaattaag |
| | | ggataagatccattattggtctcatcaattatatagtgaaacttatacgccagatttactctttaa |
| | | agcatggctgctccgccgtaactggccggattataagtcaatcatatctgatccagcaaatatcaa |
| | | tgaatgggtgcctgaccaacatattttagtcagtacagatgagactacagctaaggccagaaaaat |
| | | ttgggaacgttatttaaatagcggtctggcagaaaatgatgtttttaacagaataatttcagtaaa |
| | | ttgtgcgcccgatacagcgcaaaatttttcaatgacctttaatgaaaatgaagatattttatccaa |
| | | aggggaattattattgtatgaagctatccaggatttcttaatcgaaaaatatagtaggttgggttt |
| | | agtcatagaagcttgtccaacctcaaatatttatattggcagactggagaaatatcatgagcaccc |
| | | attattccgttggaatcctcctgactcccaatggattaaacctggtgggaaatttaatcgctttgg |
| | | attgcgcacaggacctttatctgtctgtataaatacagatgacagtgcattgatgccaaccacaat |
| | | tgaaaacgaacatcgcttaatgagagactgcgccatacatttttatggtattggaacatggatggc |
| | | ggatttatggataaactcaatacgcataaaaggtattgaaatattcaaaggtaatcatttaagtca |
| | | ggatttagataatttaatctaaatgtaaacaagaaatccacgcaaatgcgtggattttaagtcaac |
| | | ttattattctctgaaacggtttaaccgttcggaacaacagattaaatc (SEQ ID NO: 281) |
| 29 | 10.B | tgtggttagttatcacagcactaacctattttcgagctttttgattgaccaataccatttctttta |
| 30 | | attatgaataatgatgcgtcaaccgatggcgaacgggccaaatccactcttctacaactgcccatt |
| 31 | | gtcacggtgtggaataattaaaaattttagatttttgagattattctcattaccatcttgatttta |
| | | tttggttttgcatcaaaattcatagttcacaagcttttctcactccaaaaacaactgtaaagggat |
| | | tattgtgaacacgatatacataccattagacagcggagagtctgcggttcttaaggatccagatac |
| | | cttacttccccgaaatatttacgaacagcttactcgatttattgaaaaggctgttaatgaagtacc |
| | | gaagcctcacgaagcgcttaatgaaacccgtagccataaggctatatcgattgacggcgcaagggg |
| | | gacaggaaaaacgtcggtgctagtgaatttgaacgactatctgcagagtaatgctcagcaactggc |
| | | ggggaaaattcatatccttgatcctatcgatccgactctacttgaagatggtgagtcgctgttctt |
| | | gcatattattgttgctgccgtgcttcatgataaagagatcaaaactgcccaaagcagagacctcga |
| | | taagtccagagtgtttacccagaagcttgagaacttggcacacggactggagtccgttgatttgca |
| | | acagaatcaacgtggaatggataaaattcgctccttatatggcagcaagcatctggcaaattgcgt |
| | | tgaagagtttttaaaatctgcgttggagttgatcggaaagaaattattgatactaccgattgatga |
| | | tgtggacacttcactaaaccgggcatttgaaaatctggaaatattgcgtcgttatcttacctctcc |
| | | gtatgttttgccggtagtgagcggcgatcgccgtttatatgatgaggtctgctggcgagattttca |
| | | tggaaggttgaataaggattcagcatataatcgcaagaacacatatgatattgctagagatttggc |
| | | aattgagtatcagcgtaaaattctgccgctaccgcgcagactgagtatgcccgatgtaagtgatta |
| | | ctggcagcaagatggtatcgaagttacgctagataaaaatggcattcctctgcgtaattttatggc |
| | | atggttgaaaatatttattactggccccgtgaatggccttgagggtagtgatttacctctaccgat |
| | | accttcaatacgtgctttaacccagttcatcaaccattgcagggatttaattcgtgagcttcctga |
| | | accattcagaaagaaagtcagtacgctggccttacgtcgtatgtggcaaatgcctgatgttcctct |
| | | tgatgttcttgaaagttttgctgaaaaacatcgggaattgagtaaagaagctaagcgtgaatatgg |
| | | ggaggcttacaagctattttatgatggactaaagaattttactgcttgggatagtaaggcttatct |
| | | agaagatgataaacaatctgcatggctcgataggttgtgtgagtattttcgttttgaacctaaggc |
| | | tggggctgtgtttttaacgcttcaggcaaaacagttctgggtctcatgggcgcagggtgacaatcg |
| | | taatcaatcgattcttgcgactccgctttttcaacccttattgcataattttcgtgaatacgatgt |
| | | ctttgaaaggtatgatgatctttctgattgggaatctcagttaagaacaaggttaccggagagttg |
| | | gttgactgccattaaagggcaaaaaacgcttttaccctatcctgtagcagaagcgggaattaatac |
| | | cagtttaaagtggaggtattgggaagaattagagaactatgggtttgatcctgctttggaaagcaa |
| | | ggcaaatttccttttgtccacgttgatgcagaggaatttttatacaaactctaaacagtcagtcgt |
| | | gataaatattggtagagtttttgaaataattattgctagtcttgtttcggatttagagttggccga |
| | | cttgcagagaattagacaacgttctccattttactctgctagcgcgcttgcacctaccaaaacgtt |
| | | agatttggaagaggattttacgaaaaagaatacaagatttatgaataacagaagtgaaactgacag |
| | | agacatttctgatgatattcttgttgatgtgccggataaaaatgaggacgcatggaaaaaaatttg |
| | | tgatgaaataaaccattggagaaagacacacaatgtggctagtacaaacttatcaccttggctggt |
| | | ttataaggtctttaataaaacatatagtcaggttgctaataatgtgtttgttcccagtggaatgca |
| | | aaatgttgatgcggctctaaatgtttttggtagggttttttatgcagtttggtcagcatttggtag |
| | | ttttgaaaaaggcgaattgttcggactatccgatgtggttgctacaactaatattatttcggcaaa |
| | | aaatttttataatcatgataacttccgagtgaatgttggaccgtttacgcctgagcaaaaccaaaa |
| | | ttctgacagcgatcgtgaggcatatcagcatcgcaaaatgtatggtgaaaaaaccagagcggtaag |
| | | ttatgtattagcaactcatccgctgaaaaaatggatcgacgaggtattacgcactgagtttaaaca |
| | | aaaacagaatgctcagattcagaccgagagaaaaatgccgattcaggctgagaaaattatagatat |
| | | cagcccggcaagagagtttatcacaagaaaactttcattaaattcacactcccggttggttaaaac |
| | | acgtataataaaacagcttaagatgttatatccaaactacgataaggctaaggacttcattgatga |
| | | agttacaaaccacttccctcagaatgatcccgcaattaatacgcttcagaaagcatttgcagaact |
| | | ttaccccgatggtgacaaataatgttaactcggtctctaagtgaacatgctgcagggtgttttttc |
| | | actgatgagcgtctgtcacaacgctttctagatatccttttatcgccacccaaggattttgaaacg |
| | | tggtcatcattgcaggaggaatctttcaagctgctcgttaagagcatcgatagccgatatccacgc |
| | | acttaccggttaaccgacgtacgccagcttgtggggaacatatgtgacaacgggttactgacgagt |
| | | ccgacactaccttggctcgatgtcattgcggatcagttactgttgcggaatggcgacttactctat |
| | | taccgcgaaaataaggttcaagactacgtgcgaatagctgcggaactcgaccctgcccttctagtg |
| | | ggatggcgtcttggcgactggcttttgcaaagcccaccgccgcgattgacggacataacccgtgtg |
| | | gtgatggcgcagaatccgttttttgctccacctgctaatgcaggtaaaccttttgccgaggggcac |
| | | gtacatctcgggggagtgacggctggagatactattttggatggctatctttttgaagagattgaa |
| | | ctacccaaaagcaaagatatgttgttgtgggcgcacaaagagcatgatgagttaacaccgttgata |
| | | aatcgagcaaagtctttgcttacagttctactttctgccccccctcaaacggtttctgagcaaact |
| | | caaaatggttttgatcagcgtaaaactgtatctgagaagtacaaggcattacagaacccaatggat |
| | | agcatccatcgtctcccagactggttattgcttgctaaaaagaatcgcggaactgaaagcgtcagc |
| | | cccggctggtttttaaaccaactggcgcatgcctccgaaaaaaaacatccctcgcgctggctgtgg |
| | | ctgcagctatacctttgccactcttatcagcttaaagacactcatccactggagcgcacggcaata |
| | | ctctgtttttggcttacggtaaatgcgctacggcgtcacattattatggacggacaggggcttgcg |
| | | tgttttaccgagcgttattttaatggtgctttacgtgcgggtaagaaagctgacagtagcaatatg |
| | | cgctacctgtttgccggtaaagacgatgtggccgaagtgaaagcatccccaaaggctttcgatcat |
| | | gagatggtcactggattttcctcgacattgctgaaaaccctcggcattccagctgtttttccaccg |
| | | tatatttttggtgagcatgagattaagccagatgaacgcgtgctgcgctatattggagcactggag |
| | | cgctggcagttttgtgggcacttttctcgctctaaaactgcaagtcgcggcaagcgagcaaaggct |
| | | gatttgcaggctaactggacagaagcggagcgattgttacagaaactgtacagtcataatggctgg |
| | | aatcatcccgtcttcttagggggtaaacgtaacccacattttcattttcagccgtcgaactggttt |
| | | cgggggcttgatgttgcaggggatgaaaacgtactaaaaattgcaggctttgccccgatgctgcgc |
| | | tggctacgaagtggattatatcccgtaccagaagggcttcgcgccagtatgagttttcatttcagt |
| | | attcatgccggggaggattacgcacatccggcgtcaggattgcgtcatattgatgaaacggttcgc |
| | | ttctgcgaaatgcgggagggagaccggctaggacatgctctggctctcggaattgaacctgcgctc |
| | | tgggcgaaacggcatggtgaaatgatactacctctggatgaacatttagataatcttgtctggcag |
| | | tggcactatgctacgcttttatcggcttcattgcctctcgctcaggcggtattaccgctgcttgag |
| | | cgtagaattgcacgctttattgcacggtgcgaatggtgcaaaaagagacctccgcaaatagataac |
| | | agtgtggtggggaaacaggcctgtagtgatgataaacctctggaaaatattacacctgatacgctc |
| | | taccgggcctggctactgcggcgtaattgttcatatcgactccagcaactccacggcggttcccct |
| | | ttgacctcgcaagagaaatgtgcgctgccggattgggccacgctcagcgataaaggcaatgtggcg |
| | | gcgcagctttatcagcaaagacactcgagtctccttgacgatatgccgccgcaactggtagttgtg |
| | | cgtgtagcggacgaatggggaactcaggagcttattggcttgggaaatcctggtaaactgcgtcag |
| | | caggctcttgacggtaaagatatcctccaagacattgatacgccggtagagctgcaatttatgcat |
| | | gctttacaggactatttgctagatcactatgatcgtaaagggttaattatagaaaccaacccaaca |
| | | tcaaacgtatatatcgcgcgattcaaaaagcacgtagagcatcctatttttcgttggaatcctccg |
| | | gatgaagaactgttgaaaccaggcgctgaatttaatcgttatggattgcgccgtgggccagtcagg |
| | | gttctggtcaatactgacgatccagggattatgcctacgacattacggacggaatttttactactg |
| | | cgagaggctgcgattgagcgtggtgtcagccgaacgatggcagaatattggctggaaaggctgcgc |
| | | ctgtacgggctggaacagtttcagcgtaatcatttaaatgtatttgaagttattgaatagaggatt |
| | | ttatcgtgagtggtacattcccttacttgcaatatacggatgtcaatgggctacaacctaagctca |
| | | aagaagagttgaaaaatttacggagaaaagagtatttgtcctactggcctcgttttctgatacgta |
| | | gaatttcgctttatgctcttccattcctcatgttcttcacttttttcttttgtctgagtctgacga |
| | | agaaagttggggcagaggaagtgactaatattcttggaaccgtgagtatatccttcagtagttgcc |
| | | tgctgctggggattattatttctggtgtcgtgttactcttgcagtggacgtgcttcaactgtaaat |
| | | acagtccgcaggatacgaatggagttgttggggctcgtaagttaaattataaattacttgctcatg |
| | | ttgtatttgttattgcatgcgtgcttttatttgtttttatttattgcaccaataataaagtgtttt |
| | | atggttttatcgtgtttcttggtttgacattattaccattggtaattgaccgtaccttgggggtga |
| | | ctcgtcaaaatgaacgtcacaaactctatatcagaaggttagagcgcctcgatgaattgaatattc |
| | | tccgggagaaaatgaatattaaattcgaagaatcccatttcatcgagtatatgaagcttgttgatg |
| | | aagctgatcacggaaaaaaccaggatacagtaagcgatacatcctattttatgacgttgatagaaa |
| | | ataagctaaaagtgtaatcggttttaatatgatgctgtataaaaaactacgcaattgcgtggtttt |
| | | ttgtcggactatgagggcaaggttgccctaaaacagaggttaaacgttgggatgtgatttattgca |
| | | catcatgccgtgcccatccagtagaatccggttcgaaatgtgtataggattgtgtatatgtttctg |
| | | ttcggtctcggattcttatacac (SEQ ID NO: 282) |
| 32 | 11 | ttttagaaatattgtgtaaaacttcttactctttactggtcatccctcagtcgtggaaaaaacaca |
| | | ctgttccatataggttttatttgtgatataatgaacaagttcttatttaagaaacctataaacatt |
| | | aagcgacggaaatatatcatgaaaatagtcagcaataccgtttgggatggacttaaactgcctgat |
| | | tatagggctcgtttttttatagaagtttggaaggagattttgtacgtcaacactccttcattttat |
| | | caatctaaaatgattaatacgatgtcaggtgccgaggagttagtcgaagccattgatgattacata |
| | | caagatgataagagtaaaaaaagcttattatcaatgatagaagattacaaaggtaatttaaaaaaa |
| | | gactctatagcaaaagacacttttaaaaacttgcatgcaacgctgttaaaaaaaattgagactgtt |
| | | cctgacccaatatctagtaattatattttagaattaaaaacaattgttaaattagtattatccaaa |
| | | gaaagtgactattatcacgaacttaaaaagcagctaaaatcatctattttgtctaacgctgatttg |
| | | aataaaaaagcccgtttaatggactccatttatcaattaactaaaagctttattggctatctcctg |
| | | tggaaggggtattcaccaacttatttatataatagaatggagtatcttacgagaattaaaaattat |
| | | ggcagtagagacttttccgctcaatttaatagttgccttgataaattaactattaggattcatgat |
| | | tatacagtttattttcttattacccctttgtctaaatatctgattgaattgaataatatccttgat |
| | | gttagctttatcaatcgagaaggtattattaatgaaaaaaactacaataaaatttcacaaggggtt |
| | | gaatcttcggtattagccaaaattgttgttaatacaacagactacgtttccgcggcgtggcaggca |
| | | aatgaaaaactggataaagtcatagattatttagaaatagagaagccagaatataatattagatat |
| | | tctcctgtatgtcttacagagttttcaaatggtagattcacacaccgtcagactataaacataggc |
| | | agattgaaacaattcattacaagtaaaaattacagcattcttgaaaatatacctaatgagtccaag |
| | | gtactcttacgagagtctataaaactagacagatatgatgtactgacaagatctttaaggtattta |
| | | agagttgcaaaagaatcaacttcacttgagcaaaaattgctgggcgtatggatagctcttgaatgt |
| | | attttcgagagcacatcaggtaatatcatttctggaataactaaccatatccctacgttctatagc |
| | | actcaaagtctagaaattagaattagatattctaaagatttattagaagcccgattgaagcctatt |
| | | tcagatagccttttagagattacagccaatcagaaatctaaatttcgagacctttctttaaaagaa |
| | | tactttgacatagtgaaaatcgaaaaaaacaggaataaaattttcgatgagttagtttccaagggg |
| | | gatgagtttgccgtttttcgactaataaaaatatttgaatcattcggaacgtcaaagaaaataaat |
| | | gatagatttaatgatactaaaaaggatgttgagtctcagctttatagaatttacaaggtaagaaat |
| | | aaaataacccatagagcatactacggaaatattaggccccaattagtggatcatctttatagctat |
| | | ttactaagtgcatatagcacactaatttatagtttaagatataatgcaataaataaatttgaacca |
| | | caagatatgtttaatgcatatattatctcgtgcgagagtttaatattcaatgttgaagaagaaaaa |
| | | aaacttgaaaatataactatggatgaaataattttatcatagtgaatgttttctaggtgtcgtatt |
| | | c (SEQ ID NO: 283) |
| 33 | 12 | atggtagcgataaaaatgtatccggcaaaggatggggatgcttttcttattatttgcgatgaggaa |
| 34 | | aaaagtgcatttctgattgacggaggctacgcggaaacgttcaggcaacatattttgcctgactta |
| 35 | | cgtgagctgagttttaacggttaccggttacgtctggtcatggcaacacatattgattcagatcac |
| | | attggtggtctcgtggacttctttcttgtaaatggacacgcagcagagcctgcagtgattactgtt |
| | | gaccgcgtatggcacaacagcctcagggcgatgacgagacccgaaaataatgcacaaaaagtggat |
| | | tcccgagaaatcactgactttttgagacggagatatcatgtcgaagccgataaagccaaaccgcat |
| | | gaaatcagcgcgcgtcaggggagttcactggctgccagccttctggctggcgattatcattggaat |
| | | gagggaaaagggtatcagtgtatctgcaccggtacctccattcccaacttgatgtgcgataacagt |
| | | ctaacaattctgagcccctctaaggagagaatttcagcgctctgcctgtggtggcgcagacaactt |
| | | gcatcgctgggcttttcgggacggtcctcctcgagtgaggcatttgatgatgctttcgaatttttt |
| | | tgtaaaagggaagcatctcaggttcctcttccgcatgtcatcaatgcaagaacaccgttgcttgag |
| | | agggattatgcacgggatacctcgccaacaaatggcagttcgatagcgttcagtctggtgctcaat |
| | | aagaagagaatattgatgctaggagatgcctgggcggaagaagttgtgacatctctgggtgccagt |
| | | ggggcgtcccatcattttgatatcattaaaatctcacatcacggtagtattagaaacacaagcccg |
| | | aatcttttaaagatcatagatgctcctgtgtacctgatctcaaccgacggaaaaaagcatgccaga |
| | | caccctaacctggcggttctgaaagcgattgtggacagacctgcggcgtttacgcgaacgctctat |
| | | tttaactatgccaacagcgcatctgcttttatgaaaaattacctttctgcaagtggtgcacaattc |
| | | agaatcattgaaggatcaacggattggataacactgtgagatatgctgctactgaaactgaaataa |
| | | ggaacgcaactgtactcattgaatgcgcgggttacactggttccggaaccctgatcgcagcagaca |
| | | aggtccttacggctgcacattgtgtagtatcggatgatcctgagacaccaattacagtgacatttt |
| | | ttggtgcggatgaagacgtctgtgtcaatgcgacaatttcagaaatagatacatcgtgcgatgcct |
| | | gtctgctaacactttctgactctgtcgacattccgcctattacacttatgacacagccggagcgag |
| | | agggaagccaatggaaagcctttggctatccggcatcacgcaatgggccatcacattatcttcatg |
| | | gcactataagtcagattttaccaaggcttttccatggcgttgatatggatttgtcggtcagtgccg |
| | | attgtgttctggaagagtacagtggagtttctggtgccgccattctatcagaaaataaatgcattg |
| | | cgatggtgcgcatcaggatggatggtggactaggtgcagtaagtcttgataagttaagcggtttgc |
| | | tgattcgaaacggcctcatcccagatgacattgcatccctgccagattcatcactgtcgggtgaag |
| | | ttgtcctgaaccgcacagaatttcgcgacaactttgaatcgttcgtcctggagcacaagggacgtg |
| | | cagtgcttttggaaggtagtcccggctctggtaagactaccttctgccgccattatcagccccgta |
| | | gtgagcaactcgcagtggcgggtgtctatgaatttacaccggaagacggtgctggtacgacattca |
| | | aaattcttcctgaggtatttgccgattggctgcataaccaggtttctatactgctttcaggtaggc |
| | | ctgctcgcagggaggaaacagaaaagatcaatctgacccaaaaggtgtctgaccttctacatactt |
| | | tctcagattactggaagcacaaaggaaaatatggcgtcattttcattgatgctgtgaatgaggcaa |
| | | gcgagtgcggggatgaggcagtatcgcgctttacagcattactgccggtgacacttccggagaacg |
| | | tcaaacttgttttcaccgcaccatcattatcatcagctggtaaggctttccggcactggctcacac |
| | | ctcaggattgtatcagcctaacgcttttaagccatagggaggtgttacagctaacagctcgagagc |
| | | ttaaaacttccgccccttctttgtcactactcacacgagttagtgatatagctcagggccatccac |
| | | tttatctccgatacattcttgggtatctgaaagcgaatccggatcaggttaatctggagatattcc |
| | | cggttttcagtggcagcattgaaacctactacgaaaggctctggcaggggctggttaaggatgaga |
| | | gcgctgtaaatctgctcggtattctctcgcggatgcgctggggcattgatatttcatcactgatcc |
| | | ctgttctaacaccgcaggaacagacggtgtttgttccaacccttgaccgtattcagcatctgcttc |
| | | ttaatgataaatcatcagcattgtgccaccaatcatttgcggcgtttatcaacagtaaaacggcgg |
| | | taattaactcgctgctgcacggacgccttgccgacttctgccttaccagtggagagagttatggcc |
| | | tgattaatcgcgcttatcacctgctcctagcctctcacgacagacatcctgaagccgcattggtgt |
| | | gcacgcaggaatgggctgacgcctgtatcgtcaagggggctcagccggatattctaattcacgata |
| | | tccgtcagaccctgaagaacacgcttattcgtgccgatgcagtggcatcgattcgtctgttgctgc |
| | | ttttccaacgcatgaccttcagacaccattttttgtttctgcagtcagcttatcactcaggccttg |
| | | ccctggctgcacttggcagaccggatgaggcccttgagcagctcataccatctggaagcctcgttg |
| | | ttgatgcagttgatgcaattgtcagcgcacagactctcgcgcgtatgggaaacagtgaacacgcgc |
| | | tgaagctattggaaaaggtgaagtcagctgtcgaccaagaatttgaacgcaatcccgtcaatctat |
| | | ctgattttatcggcctttccctggcttgggtgagagctgagctgatggctggggtggttgatggcc |
| | | acggacgcacacgcgaggttgttgagtatttgtacggttgtgggcaagtcgttcgcgataattttg |
| | | aacaatcagcgcatagtaaatcagcatatacacgcgctttttatcctcttcaggcagaaatggaag |
| | | ccgtgaacatagcctttaatgaccgctccgtatctttacggacggttaaagaaaagtttggtagct |
| | | taccggaaaatattcttgatctgatgctcagttcagttatgcgggcacatgacatcattctgcaac |
| | | atcagttgccgatgccccagcatgctttgcaacccgtttggtacaatctggacagattacttcata |
| | | ctgatattccgtattcgaacgaaattcgttttaattcattaagtagccttatttttttcaatgcgc |
| | | cttctgctcttattatcaggatggcgggggtattttctttcgaagtagtacccgaaataacgttgc |
| | | tcaatgaagaaaatgagatagcagcagacagcattgacgttagtgaacagggacaactctggctgg |
| | | tgagcgcctaccttaatgaaacgcaaccctgtcccgatattaaacatccgagtcagggatgttctg |
| | | aatggctcaagacattgactgaggctattttttggtacagcgggcaggcgcgccgggcagttattg |
| | | acggcaacgatgagaaaaaagaactgcttttagtcaaggtgcagaatgatattctccctgctcttt |
| | | cgtactcgctggaagagcgcatggcatggccgaattcatgggcaatgcctgaacagattatcccca |
| | | tgatttacgaagagttagtaaacatgttcggcgcatgctggcccgataagatatcagtgatcactg |
| | | atttcattctggctcatacgcctcagcaatgtggactttattccgaggggtacaggcgtttactga |
| | | acagagttattcagactcttctaaatgagcatcggtttttggggcaatctgatacgacatttcaac |
| | | tacttgagacgttgcatgcgtttgtttctgcttttactgagaatcggcaggagctggttcctgaat |
| | | tactgaatattattccagcttatattagccttgatgctcctcagctggcacaggacacttacactg |
| | | agcttttaggtgtgtcgatgggccctgactggtacaaagaagaccaatttgccctcatgacaacta |
| | | tgctgcgcgtgataccacagcatacagacacaaatactacactttcacaagttgcaggattccttg |
| | | aacatgcttcgggtgaaatgacatttaggcgttatgttaggcaggaaaaatcacagtttattggcg |
| | | aacttattcgtcgtgggaattatgcacacgggtttaactattatcgtcagcagtcctgcggatccc |
| | | atgaggaaatgctcacccaacttagccacccagctgcagatagccctcatccattgaaaggcatgc |
| | | ggttcccggggggagcgctggatgaggaacatgctgtagaatgcattgtcagtgaactgcgaaaca |
| | | gagtcgactggcggcttcgctggggacttcttgaaatattcagctttggcagtattggtaatcttg |
| | | cagtgccctttgctgaacttatcaatgaattttctgcagacactgaagaccttaatgaaataccca |
| | | aaaggttgcacaacattttacatggtgatgtgcctttctcagaacacagaaattttatcaaaaatt |
| | | tcacagagcaccttgcagacaaccataagccactctttgctgaatttatcagtttgctatccgaag |
| | | acactagcgataacgacgttaagcctcccccctctggtgatgctaaccagaagggtactgatacct |
| | | cagatgatgtggcaatgcagccaggactttttgggaagcgttctgcgatcaatagggctgaagcct |
| | | gcatggaaaatgcccgaaaagccgcagcacgcagaaacacagttcgtgcaagtgagttagccgttg |
| | | aaagcctgcatataattcaggatggtgactggtcagtctggagaaagaacaaccatctggcggaac |
| | | ttacacggacgtacatattggacaactctgcggatgcaggttcggtcattcgtgcttatgcttcgc |
| | | ttgtagaaaaagaacgttatgccccggcatgggtaattgctagtcatctcatcgaaatagcagcca |
| | | gtaaattctctgatcaagaagcccaagctattaaccagatcgtacttgaacacaaccgccacatgc |
| | | ttgggaataccgaagcggatgctgcgcatttttcttttcttaatgaacctgatacctcagatgcag |
| | | gtgaagaaacactctattttctgttttggctgctggaacacccactgaaattcagacgcgaacggg |
| | | ctctggaagtactgaagtggcttgcatcagacgatgataagattctgggccaatgcgtgacggagg |
| | | cactcgtttcagacattgcctcacgagctgaagcactaatggcattgacagactgggtgtcagcta |
| | | gatctcctcagcgaatatgggactttatagttaaagagcgcagcctttttgaatggcttgaaggca |
| | | ctactgcactaagccaagtccatctcctggagcgagtaaccagcagagcgggatttgttttaagaa |
| | | atgagattgccgcatttgagcgaccccgaaagcttttactgacatcagaagcctctggacaacgga |
| | | atattccagaaaatttaccaacatgggtgcaatccttgtcgcagacccttgccgtgatggaaaagc |
| | | agggaatagatatcccagctttgcttaccttactcgaaaaacgggttttacagcagagtggattgg |
| | | ctgatatcacggtggcttttgagctggaaaagttacttgcgcgtggttttactgtgaatagaacac |
| | | caagtcaccatcgctgggagacgatggtgcgatttgcattaaaccagatcatacatgaggcggccg |
| | | cacaggatgaactgcaaaacattgaacccttgctacgtgcctggaaccccgcgtcagaggagtgtg |
| | | ttgagccgtgggaggtttgtaaccgggcaaaacagattatctgcgctgttatggaaggtagacatc |
| | | agcaagcttcgggcatagaggatggctttttcttgcattatcttgatgaagtggaggtttcccgag |
| | | aaggtcaaacgcatctggtggaaatctcagcggtgttaacgacagctcataatggtcatgagagcc |
| | | ttagaccaggtgcagaaagcgaatttaatgcaacacagacacctgatatagagcggacgcttagtg |
| | | tgcaccttacatgccagcgagtcaaaatgcagcctttgctttttgggggagctacgcctgccgcag |
| | | tgtcgaaaaagtttatgcagatgactggaacgttgccttcagactttattcgcaggcaatggcgaa |
| | | gcgggcgttctcttagtaaaaacagatggggggaaccaataagcagaggaagtctgttactcatga |
| | | aaagaacaactaccctccctccaggactgggcttagcgtggtatgtcactgtcgatgggaagttga |
| | | tgaatatattttcatatgccccgaggaggagataatgaaatacagttcaatggaaacgccaaaaac |
| | | gcgagaggaatttgaggctcgctgttttcacctgctcaatgcgatcaagttaggacggtatcatgg |
| | | cattccgggtgaaggtaacaaagagcaggttccttttctccctaacggacgagttgatctggcaaa |
| | | cattgataccatgactcgcctctcgatgaactcgttatatgatttccactataacagggataatta |
| | | tccgcagtttgatctctctgaaaatgacgagaatgaagaggctacggattga |
| | | (SEQ ID NO: 284) |
| 36 | 13 | gggatttccaccacctcccaccgaccatctaagactttatgccactgtccctaggactgctatgta |
| | | ctaggagcggatgttaaactcagactcgtttcagctacattgcgttttgaataatattccatcata |
| | | ataactctttgaaaaatgtgatcttttcatttataacactgatgacttgcttatctcattgggata |
| | | tcggaggagaatacttaactatgacaagcccgattattatgacactggctatattatatagattga |
| | | tattaaaatgtaggattaggttcttgccaaggtgtcaagatttacagataggtttaaaaccatata |
| | | aatatgttttacggtgagatacaatacatattgtaaggcataaacgcttggtaaaattttaattat |
| | | tggaagaagctaatcatggaacccatatcaattacagtggcaacttatgtagcaactaaacttatt |
| | | gatcaattcatctctcaagaaggatatggttgtattaagaaagcattattcccccaaaaaagatat |
| | | gtggatagattatatcaactaattgaagagacggcaattgagtttgaagaaacatatccagtagaa |
| | | agtggagcaataccattttatcattccgaaccattgtttgagatgttgaatgagcacatctttttt |
| | | aaagagttccctgacaaagagatattattagacaagttcaaagaatatccaagtatcactccccca |
| | | actcaacaacaactcagccttttttatgagatgttatcattaaaaatcaataattgttcgaagtta |
| | | aaaaagctacatatcgaagaaacgtataaagaaaaaatattcgatattaatgaagagctcattcaa |
| | | gtcaaacttattttacggtctatagatgagaaactaacttttcacttaagtgatgattggttaaat |
| | | gaaaaaaatagtcaagcaatagctgacttgggaggtcgatacacacccgaactcaacgtaaagcta |
| | | gaaatagcagagatatttgatggcctcggtagaactaatgatttttctaaaatattttattcgcat |
| | | atagatagctttctggtcgctggaaagaaattacatagttgcgatgtaatttcctcagaattattt |
| | | gaaataaaccagtccttaaaagaaatttctgatatatatcaggagattaatttttctaaattagat |
| | | gaaatccctataaataaatttaataactatgtttctagctgccagacagctattggcggagcggta |
| | | tcaatattgtgggaactccgagaaaagtcagagcaagtaggtgaaaccaagcattacagtgataag |
| | | tattcatctactctgcgaatgcttcgggaatttgactatgcgtgcaatgaattacgtatattcatt |
| | | aattcaacaacagtgaagttggctaacaacccattcttacttctcgaaggaaaagcaggaattggt |
| | | aagtctcatttactggctgatgtgattaaaaatcgaattgcttctgggtatccttcactactcata |
| | | ctagggcaacaacttacttcagatgaatctccatggtcacaaatcttcaagagattacagcttaaa |
| | | atcacttctcgtgaattcctagaaaaactgaatttatatggcaaaaaaacaggaaaaagagtctta |
| | | gtttttattgatgctattaatgaaggtaatggaaataaattctggaatgacaatattaacagtttt |
| | | gtcgatgaaatcagatgctttgaatggcttggtctgataatgtcagtcagaacaacatatagaaat |
| | | gtaacaatttcacatgagaatgttgtgcgaaataattttgaaattcatgaacatattggattccag |
| | | aacgttgagttggaagcggttagtctattttatgattattacaatattgagaggccttcatctcct |
| | | aaccttaatccagagtttaaaaatcctctatttcttaagttattgtgtgaaggcattaagaaaaat |
| | | ggtttaaccaaagtgcctgttggatttaatgggatttcaaatatttttaactttttagttgaaggg |
| | | gtaaataaatcattagcatcgccaaaaaaatatgcattcgatcccagttttcctcttgttaaagat |
| | | gctctcaatgaaatcataaaattcaaattagagattggtcgtaatagtatttcacttaaagatgct |
| | | cactcagtggttcaatctgtagttaatgattatgttgctgataaaaccttcctcagcgccttgatt |
| | | gacgaaggattattgactaaaggcatagtgagaaatgatgataattctactgaggaagtagtttat |
| | | gtggcttttgaaaggtttgatgatcatttaactgttaattttttattaaatgatgttgaaaatatc |
| | | gaaagtgaatttaagcctgatggtcgtctgaaaaaatattttcatgatgaatgtgatttttatata |
| | | aaatcgggaatagtagaggcgttgtctattcaattgccagaaaggtatgaaaaagagctttatgaa |
| | | tttctgccggagttcagcaataatcttaaattactagaagcctttattgatagcttgatatggcgc |
| | | gatattaaggctattgatttcgaaaaaattagacctttcatcaatgaacatgtttttaaatttaaa |
| | | gatagttttgatcatttcctcgaggcagtgatctctatttcaggtttagttggccatccctttaat |
| | | gctaatttcttgcatgattggctaaaagattattctttggcaaatcgagattcgttttggactaca |
| | | gaacttaaatataaatatagtgaagactcagcatttaggcatctaatcgattgggcatgggccaga |
| | | acagataaaagctttgtttcggatgagtcaatcgagctagttgcaactagtttatgctggttttta |
| | | acttctagtaaccgagaacttcgagattgctcaactaaggctttagtgagtttactcgagccaaga |
| | | attcctgtattgagaaaaataattgataagttttatggtgtaaatgatccttacgtttgggaaaga |
| | | atatttgcagttgcattaggctgtacattgcgaactgataatattaaagaactaaaatatttagcc |
| | | gaaactgtttaccaaaaggtattttgttctaagtatgtgtatccaaatatattacttagagattat |
| | | gctagagagattattgaatttgctaatcatcttggattggaacttgaaagcattgaattatccaag |
| | | actagaccaccctacaacagcatttggcctgacaagattccttcaaaagaggaactagagtccctt |
| | | tatgataaagaaccttatcgggaactctggagctctattatggaagatggtgacttttcacgatat |
| | | actattggaacaaattataatcattctgattggtctggttgcaagtttaatgaaacccctgttgac |
| | | cgtaagcaagtttttaaaactttcaaatgtaaactaactgatcaacaaaaagacttgtatgatgcc |
| | | acagatcctttcatttatgatgataaatgcgaaggaattaaatttggtcgtgtggtcggtagaaaa |
| | | gcacaggaagaaataaaggcgagcaagaaattatttaagaattcattgtcatacgatctgttaagt |
| | | gagtttgaaaatgaaatagagccatacctggatcataataataatctgctggaaactgataaacac |
| | | tttgatcttcgactagctcaacaatttatattcaatcgtgttatagagcttggttgggatccggag |
| | | aagcatggtaattttgaccaacaaataggaactggacgtggacgtagagaggcattccaagaacgg |
| | | attggtaaaaaataccaatggattgcttattatgaatacatggcaaggctagccgataattttact |
| | | cgttttgaaggttatggtgacgaacgaaaggaaaatccataccaagggccatgggagccttacgta |
| | | agagatatagatcccactatcttacttaaagaaactggaacgaaaaaaataagcaataaagaaatg |
| | | tggtggcttaatgatgaagtgtttgattggacttgctctaatgaagactgggttaaaagttctact |
| | | actataactaattcatatgcttttattgaagttaaagatgataatggtgatgaatggatagtatta |
| | | gaaagtcatccatcatggaaagaaccaaaaattattggaaacgatgattgggggcacccacgaaaa |
| | | gaggtttggtatcagatcagaagttatatcgttaaagttgaagaatttgaaaattttagatgttgg |
| | | gcaatagctcaagactttatgggcaggtggatgccggaatgtactgatagataccaattatttaat |
| | | agggagtactattggtccgaagcatttaagtcttttaaatcagattattatggtggatctgactgg |
| | | acttcggtaacagaccgggagtctggagctaagatagctgatgttagtgtcacttcgattaattat |
| | | ttgtgggaagaggagttcgacaaatcaaaaatagaaactttgaattttttgaagcctagtaactta |
| | | atctttgaaaagatgggattaaaaagtggggaagtagagggtagcttcaatgatgaaaatggaact |
| | | atggtttgctttgcagctgaagctgtatatgcttcaaagccgcatctacttgttaaaaaagaacca |
| | | tttttaacaatgttaagggacaatggttttgaaatcgtttggacattattaggtgaaaagggcgtt |
| | | atagggggctcactcatatcaagtcatcattatggtcgacaggagtttagtggagcattttattat |
| | | gaagacagtcagctaacaggaagtcataaaactagctttacgagataaaaatgaatctcagagctg |
| | | aatatataagtagtattagaaaccgggttatacttaagaaatcaatcttaagtgtggcagtcgaat |
| | | ggtagctaatatgctagcggcgctaatgcctgtttgttgctcataacaggcattcactttagttat |
| | | ggcagaaaagtatacatgctgggttgggaaagtgtgaaagaaaggaagattgctgcgccgtttgtc |
| | | gtcacgtttatcttcattggctatgca (SEQ ID NO: 285) |
| 37 | 14 | acaattttttgccataagacgctttcctgaaactcttctcattctcagcaggaaagcgttctcttc |
| 38 | | tcaatactctctggttatagagtattaaaaaataaggagttataatccttgtagcccaactgacat |
| | | aaggacgatgctcaatgtctgacagcctgcttgttcgcaccagtagagatggcgatcagtttcatt |
| | | atctttgggcggctcgccgcgcccttcgactactggaacctcagtcaactcttgttgccctgacca |
| | | ttgaaggggcatcaacgacggaaatgggctctcagccagtggttgaggatggggaggagctgattg |
| | | atattgctgaatattacggcagtaacgagctcgcaacagcaacaactgttcgttatatgcagctaa |
| | | agcattcaacaatgcactcagatactccatttccccctagtgggttacaaaaaaccatcgaaggtt |
| | | ttgcaacccgttataaggcacttatacaaaaaataccggtagaaacgttacgcactaaactcgagt |
| | | tctggtttgtgacgaaccgtccagtcagtagcagcttcagtgaagcgatcaatgatgccgcgaacc |
| | | aacacgttacacgccatccacatgatctggcgaaacttgagaaatttaccgggcttcaaggcgctg |
| | | agttatcgatattctgccagcttttacatatagaaggtcagcaggacgatttatggagtcagcgga |
| | | atatcctgctaagagaatcagcgggatatctccccgacctggatactgaagcccctctgaaattaa |
| | | aagagctggttaacagaaaagcgttaaccgaaagcgccgcaaatccttccattaccagaatggatg |
| | | tgttgcgtgctttgggggtggatgaaacagatctttttcctgcgccctgtcgtattgaaagaatag |
| | | aaaattccgtctcaagaactcaagaggcgacgctggttcaacgtgttgttgaagcattcggcgcac |
| | | ctgtgatcatccatgccgatgccggtgtggggaaatcaattttctctactcatatagaggagcatc |
| | | ttcccactggttctgttagcatcttatatgactgtttcggactgggtcagtaccgtaacgcgtctt |
| | | cctaccgccaccaccatcgtacagcattggttcagatggctaatgaaatggcatctcgtggtctct |
| | | gtcatccattgatcccaaatgctggtactggcatatcccagtatatgcgtgcgtttctgcatcgcc |
| | | tttctcagagcatttcaatactccgggcctctgagcccttggccgtattgtgtattattattgatg |
| | | ctgcggacaatgcacagatggcggcggaagaaatcggtgaaacgcgttcttttatcaaagatttaa |
| | | ttagagaaaagcttcctgatggagtctgccttgttgcactttgccgaccttatagacgggaattac |
| | | ttgatccacctcctgaagcactcacattatccctacaaacttttaatcgcgatgagacagccgctc |
| | | atcttcaccaaaaatttccagatgccagcgaaagtgatgttgacgagttccatcgtctaagctctt |
| | | gcaacccccgggttcaggctctgtcattatcacaaaatcttccactgaacgacacattgagacttt |
| | | tggggccaaatcccaaaacggtagaagatactattggtgaagtgctggaaaaatccattgctcgct |
| | | tacgtgatacagccggaatatctgaacgtgctcaaattgatacgatttgttccgcactggcaatat |
| | | tgcgtccattaattccattatctgtgctatctgccatttccggagtagctggttctgctattaaaa |
| | | gtttcgcacttgatctgggacgcccgttaatcgttagtggcgagactattcagttctttgatgaac |
| | | cggccgaaacatggtttcagaggcgctttaggccatcggccgctgatctgcatcagtttattacta |
| | | aactgagaccactaacaaaagatagttcctatgcagcatcagttttacctgcattgatgctggaag |
| | | gaaaccagctttctgaactgatcgagctagcgatatcctcacaagctctgcctgaaaccagcgcgg |
| | | ttgaacgcagggacatagaacttcaaagattacagtttgcgttaaaagcagccttacgcacaggtc |
| | | gataccaggatgcggctaaactggcactgaaagctggtggagaatgcgcgggtgacaacaggcaaa |
| | | gagtcctgctgagggacaatatcgatctggcagcaaaatttgtgggaagcaacggcgttcaggaac |
| | | tggtttcccgtaacgcatttccagatactggctggcctggctccagaaatgcttattatgccgcaa |
| | | tactttccgaatatcctgaactctcaggagaggcccgcagtcgccttcgactcaccatggagtggt |
| | | taacaaactggagtcaattaccagatgatgagcggagcaggcaaaatgttaccgatcaggacagag |
| | | cggtaatgctcattgcctgcctgaatattcatggcgcggaagcggcagcaagggagctcagaaggt |
| | | ggcggcctcgaaaactatcttttgacgctggaaaaattgttgccatgcagttactggcccacgccc |
| | | gttatgatgaacttgatcagttggctattgcggctggaaacgatatcagcctggttatgggaattg |
| | | tactggaagcaagaaaacttcaccgtccagtcgctgaacaagcaatcagaagaacctggcgcttgt |
| | | taaaaagtcagcgagtcagcattaaagacagaaaccacgctaataaccagacaatagcagcaatca |
| | | ctggcatggttgaaatggcgcttatccaatctgtttgtactgaatcagaaagcatccagttgttgg |
| | | atcgttatttaccaaaggttcccccctatgctctgacttctgagtatagtaaagaaagagttgctt |
| | | acgtccgggcatatgctctgcaggcaaacctgatgggctctcaattagcgcttagcgatttagcct |
| | | ccacagaggttaaaaaagaacttatggctgaaaaacgccacggcgaatctgatgacctgcgtcaac |
| | | tgaagcagtacagcggagtattaatcccttggtataatttatgggccaaagtaattcttggtaaaa |
| | | caaggaaagcagacttagaaagtgagctaagtgatactcaaaaagaatcgacggctattaaaggtc |
| | | attcttactctgagcattcattatcatcaaatgagatcgcaaatgtatggtttgatattctgatcg |
| | | aagcaggtaatgtatcaaaagacgatgtggaaaacatcatcaaatggagtcagcataaagggaata |
| | | gagtattcacaccaacgcttcaccgtttcagttctgtatgtgcagagatttcagggcttggagagc |
| | | tttcatatcacttcgcagaacttgccttatctttatggagggatgagcactctgatgctcagatca |
| | | aagctgacggctatatagacctttcccgttcactcatttcacttgatgaaccagaagctaaagaat |
| | | actttaaccaagcgattgaagttacaaataagttaggcgatgaaaatttaagtcgatgggaagcga |
| | | tacttgatcttgctgaatatgttgctggtaaaacgcaagtccctcctgaaatttcctataaactag |
| | | cccgatgtgcggaactaaccagagaatatgttgatcgtgataaacattttgcatggagtgatactg |
| | | ttgagattttggctgagttatgtccatcttcagccctagcaataataagtcgttggcgtgaccgta |
| | | catttggcaatcatagaagcatactggcatggaccattgagcatcttgtaaagaaaaataaaatta |
| | | atgcactcgatgcacttcctttaatcacatttgagaatgattggcataaatgcgacttgcttgatt |
| | | cagttttatcctcgtgtactgatgacaaagataagatcatggcattcgaagtggtttaccactata |
| | | caaaatttaacgtacaaaatatccaaaatcttaaaaagctggatgctatttctacatcattaggta |
| | | ttgaacacacagaactgaaagaaagaatttcaggtctacaacatactgagacggtttcaaaaaaat |
| | | ccagtctctcatcgaatgataatgagcaaggccatgaccaggaatgggagtccatttttaaagatt |
| | | gtgatttatcgtctattgatggtattagtgcagcatacgaaaaatttcgtaatgttcctgaattct |
| | | attccaaagaaaccttcatcaagaaagcaataagccgagttaagacgggcaaagaatgtagtttca |
| | | ttactgccattggtgctatatttcactgggggctttatgattttaaatatattcttgaatctatac |
| | | ccgacgaatggacatctcgtttaagcattaaaaccaccctggcaggtttaataaaagaatattgcc |
| | | aacgcttctgtatgcgaatcagaaaaagtcgcgtttacgagatttttcccttcagtctggccagca |
| | | ggctttctggtataagtgaaaaagagattttcggtattaccctggaggccattgcagaatcgccag |
| | | agcccgcaaactctgaccgtttatttagccttcctggccttcttgttagtaaactggagagtaatg |
| | | aagcgttagatgtattatcttatgccttggatttattcgacgaggtgctaaaagatgaggatggtg |
| | | acggcccatggaacgagaaattatctccgccaactcatgtagaggattcacttgcaggctatattt |
| | | gggcgcggctgggttctccggaggcggaaatgcgctggcaggcagcacatgcggttctggcactat |
| | | gtcgaatgagtcgtacatgcgttatacaaggaattttccagcacgcaataaatgctaccactttac |
| | | ctttttgtgatcgcaatctgcccttttataccctccatgctcaattgtggttgatgatcgctgctg |
| | | caagggttgcgctggatgatggaaaatcgctgattcccaatattggttatttctaccattatgcca |
| | | ctactgatcagccacatgtattaatccgtcattttgctgccagaactttacttgcactgcatgata |
| | | gcgacctgatctctatcccagcacaagaagagaataaactccgaaatataaaccagtctacgactc |
| | | tccctgtgcttgataaggttgaagatcatagaggtgaagattcatatacttttggtatcgactttg |
| | | gcccttactggctaaaacctctgggacgttgtttcggtgtatctcaaaaacagttagaacctgaaa |
| | | tgcttcgcattattcgtgatgttcttggttttaaaggtagccgcaactgggatgaggatgagcgta |
| | | ataaacgacgctattatcaagacagagataatcatcacagtcatggttcctatccacgggtcgatg |
| | | actaccatttttacttgtcataccatgcaatgtttatgaccgctgggcagttattagcgacaaaac |
| | | cattagttggtagtgactacgacgatgtcgaggatgttttccaggactggttaagaagacatgata |
| | | tttctcggaacgatcatcgctggctcgccgatcggagagatattccccccaaagagcgctccagtt |
| | | ggcttaatagcagttctgacaatagggatgaatggctagcgtcaatctctgaaaatgtatttaacg |
| | | aaacactatgtcccagccccggactattaacgctatggggacgttggtctgacgtttgttcagatc |
| | | gaaaagaatctattattgtccattctgcgttagtatcgccggagcgatctttatcgctcctcagag |
| | | cattacaaacaactaaaaatgtatatgactataaaatccctgatgctggagataatcttgaaatag |
| | | atcacgcacactatcagctaaaaggatggattaaagatattgctgaatactgtggaattgatgagt |
| | | ttgatccctgggcaggtaatgtaaggtttccaatcccagaaccagcctcatttatcattgatgcga |
| | | tgaaattaactactgataaagatcatcgggtatggtattcaccttctgatgttgaaccggcgatga |
| | | tttccagtatctggggccatctatcaggtaaaaatgatgaggaaaaatcacatggttataggctat |
| | | gtgcttcaatacacttcataaaatcagcattagaaacattcaacatggatctcattttagaggttg |
| | | atgttgatcgctattcacggaacagcagatatgaacggaataatgaaaatgagctcgacaatatcc |
| | | cttcaagcactcgactcttcctcttccgacatgacggaaccatccacacgctatacggcaattata |
| | | gaaatggggaaaaaactagttgatgagcttgagctaaatgactctgttgatacattaagcagatgg |
| | | atggctcatcatatcgcagagctcatttatgatgctgaacattgtacagacgacatcgtccgtaca |
| | | gctaaacaagcggagattagggactctatctggtcattctggtctaacagatacgaattgccaatt |
| | | ggtagcagaccatttcaggagctcgaacctattctaagaaccttaaaaggtcttgatcctgaaaat |
| | | gagcaaccgagatttttttcaccttaccgagatctaattaatgtagaaaaagaaaccagtgaggtc |
| | | caaaaatggctaaccgccgctaaggatattgattcagcagcaaaaatactgattgattactgttta |
| | | tcgttagcagcagaaaatgctatcgataaatcccaagaatgggtggaattagcacagaaagctgga |
| | | ttgaacaaagatgttgatctgcttgaaattcgtatctttcagttacgaggtaccccagccaataca |
| | | gacaatcccaataatgcacaacggagaatactggaaaaaaggcaaaaaaggcttgaagcttttctc |
| | | ttattgggctcccagttaaacgaacaactcaaatctcagcttgaagccttaccagcaattgaggat |
| | | gagccaacggatgacgacgaagacttttgatatgacttgctttagcactggagacggctcacaaga |
| | | cggaccacataatagcctaacccaagacttttctactagtcctaatg (SEQ ID NO: 286) |
| 39 | 15 | gcgcagctgacaaagattgaccgtgagcgctctgatggagaaagacgatagttgctgagtacgata |
| | | tcgagggtacatttctctgtgtaggggtagttatttacaaaaaaataggagaataattaaatggtc |
| | | aaaccaaactgggataactttaaagctaaatttagtgagaatcctcaaggtaattttgagtggttt |
| | | tgctacttgttgttctgtcaagaattcaaaatgcccgcaggtatatttagatataagaatcaatct |
| | | ggtatcgaaactaatccaataaccaaagataatgaaattatcggttggcaatctaaattctatgac |
| | | acaaaattgtcggataacaaagctgatcttatagaaatgattgagaaaagcaaaaaggcttatcca |
| | | ggattaagtaaaatcattttctatactaatcaagagtgggggcaggggagaaagtcccatgaacct |
| | | gaaggcgataagaacgctgataattatttggaaactgtcggaaatagtaacgatcccaaaataaaa |
| | | attgaagttgatcagaaagcatatgagtcgggtatcgaaatagtatggagagttgctagttttttt |
| | | gaatcaccgtttgtaatagttgagaatgaaaagattgctaaacatttcttctcccttaatgaaagc |
| | | atctttgatttattagaagaaaagcgcaagcacacagaaaatgttttatatgaaattcaaaccaat |
| | | atagagttcaaagacagaagtattgaaattgacagacgacattgcatagaacttctacatgagaat |
| | | ctagttcagaaaaaaattgtcatcgtcagcggagaaggtggggttggaaaaacagcagttatcaaa |
| | | aaaatttatgaagcagaaaaacaatacactcctttctatgtctttaaggctagcgagtttaaaaag |
| | | gacagcattaatgagttattcggtgcgcatggcttagacgatttctctaatgctcatcaagacgaa |
| | | ttacgtaaagtcatagtcgtagattctgctgaaaagcttttagaactgaccaatatcgatcctttt |
| | | aaagaattcctgactgttttaataaaggataaatggcaggttgttttcacaacccgtaacaattac |
| | | ttggcagatctgaactatgctttcatagatatttataagataactcctggaaacttagtaataaag |
| | | aaccttgaacgcggcgagctaatagagttatctgataacaatggatttagccttcctcaagatgtt |
| | | cgattattagaactaatcaaaaatccattttatctaagtgaatatttgaggttctataccggtgaa |
| | | agcatcgattatgtgagcttcaaagaaaagctatggaataagattatcgtcaaaaataaaccttct |
| | | cgggagcagtgtttcttagcgactgcttttcagcgggctagtgagggccaattttttgtctccccg |
| | | gcatgtgatactggaattttagatgagttagttaaagacggaattgtcggctatgaagctgctggt |
| | | tacttcattacacatgatatatacgaggaatgggcattagaaaagaaaatttctgtcgattatatc |
| | | cgtaaagcgaacaataacgagttcttcgaaaaaataggagaatcacttcctgttcgccgtagtttt |
| | | cggaattggatatctgaacgattgcttttagatgaccagtccataaagccttttatcgcagaaata |
| | | gtctgtggagaaggaatatcaaatttttggaaagacgagttatgggtagctgtccttctttccgac |
| | | aattcaagcatattttttaattactttaaaagatatttacttagtagtgaccagaatctattaaaa |
| | | agacttactttcttattgaggcttgcttgcaaggacgttgattacgatctgcttaaacagttaggt |
| | | gtaagtaattcagatctgctttccattaaatatgttcttactaagcctaagggaactggttggcag |
| | | agtgtgatccaatttatctatgaaaatttagatgaaatagggatcagaaatattaattttatactt |
| | | cctgtgattcaggagtggaatcaaagaaacaaagtgggtgaaacgactcgattatctagtttgata |
| | | gctctaaaatattatcaatggactatagatgaggatgtctatttatccggaagggataatgagaaa |
| | | aatattctgcatacgattcttcatggggcggccatgattaaacctgaaatggaagaggttttagtt |
| | | aaggttcttaaaaataggtggaaagagcatggtaccccatatttcgaccttatgaccttaatcctt |
| | | actgacttagattcatatccggtttgggcatctctcccggaatatgttctacaattggcagatctg |
| | | ttctggtatcggccacttaaagaaacaggcgaacgttatcacagtatggatattgaagatgagttc |
| | | ggtctatttaggtctcatcacgactattatccagaaagtccatatcagactcctatatattggtta |
| | | ctacaatcacagttcaaaaaaacaatagactttattcttgattttacgaacaagacaacgatatgt |
| | | tttgcccactcccattttgctaaaaacgaaattgaagaagtagatgtctttattgaagaaggaaag |
| | | tttataaagcaatatatatgcaatcgtctgtggtgctcataccgaggaacacaggtctctacctac |
| | | ttactttcatcaattcatatggcattggaaaagttttttcttgagaattttaaaaatgcagactcg |
| | | aaagtgttggaaagttggcttcttttcttgttaagaaataccaagtcagcttctatttctgcagta |
| | | gttacgagtattgtacttgcattccctgagaagacattcaatgtagctaaagtactattccaaaca |
| | | aaggacttcttccgttttgatatgaatcgaatggttctagacagaacacataaaagttcattaatc |
| | | tccctcagggatggctttggcggtacagattacagaaactctttgcacgaagaagatagaattaaa |
| | | gcttgcgatgatgtgcatagaaatacttatcttgaaaatcttgccttgcattatcaaattttcagg |
| | | agtgaaaatgtaacggagaaagatgccattgaaaggcaacaagtgctctgggatattttcgacaaa |
| | | tactataatcagcttccagatgaagctcaagaaactgaagccgataagacgtggaggctctgcttg |
| | | gcaagaatggatcggcgaaagatgaaaataactaccaaggagaaagatgaagggattgagatatca |
| | | ttcaatcctgagattgaccctaaactaaagcaatatagtgaggaagcaataaagaaaaactccgag |
| | | catatgaagtatgtaacgctgaaactatgggcaagctataaaagagaaaaggatgaacgttataag |
| | | aattatggaatgtatgaggacaatccgcaaattgctttacaagagaccaaagaaataataaaaaag |
| | | cttaatgaggaagggggtgaagatttcagactattaaatggtaatataccagcagacgtttgttct |
| | | gtattactgttagattattttaatcagttgaataatgaagagagagaatactgtaaagatattgtt |
| | | ctagcgtattctaaacttccgttgaaggaaggctataattatcaggtacaagatggaacaacctcg |
| | | gcaatttcagccttacccgtgatttatcataattatccaatggaaagggagactataaaaacaata |
| | | ttacttttgacactgtttaatgaccactctattggaatggcaggtgggcgctactcagtatttcct |
| | | agtatggtgattcataaattatggctagactattttgatgatatgcagtccctattgtttggtttt |
| | | ttgattttaaagccaaaatatgtaatcctttcaagaaaaatcattcatgaaagttatcgtcaagta |
| | | gactatgacattaaaaaaataaatattaataaggtgtttttaaataactataagcattgcatatca |
| | | aatgtcatcgataataaaatatctatagatgatttgggaagtatggataaagttgatctacatatt |
| | | ttgaacacagctttccaattaattccagttgatactgttaatattgaacataagaaattggtttcc |
| | | ttaattgttaaaagattttctacaagcctattgtcaagtgttcgagaagatagagttgattacgct |
| | | cttcggcagtctttcttggaaagatttgcctactttacgcttcatgcgcccgtgagcgatattccc |
| | | gattatataaaaccttttcttgatggtttcaacggttcagagcctatttcagagttatttaaaaaa |
| | | tttattctcgtcgaagatagattaaatacttacgccaaattttggaaggtttgggatttgtttttt |
| | | gataaagtggttactttgtgcaaggatggagataggtattggtatgtagataaaattataaaaagt |
| | | tacctttttgctgaatctccatggaaagaaaactctaatggttggcacacatttaaagatagcaat |
| | | agtcaattcttttgcgatgtatctaggactatgggccattgcccttcaactttatattctcttgcc |
| | | aaatctttgaataacattgccagttgctatcttaatcaaggtataacttggctttcagaaatattg |
| | | tcggttaataaaaagctatgggaaaagaaattggaaaatgatactgtttattatttggaatgtttg |
| | | gttaggcggtatattaacaatgagcgtgagcgaattagacgaaccaaacagttgaaacaagaggtc |
| | | ttagtaatattggattttttggtagagaaaggatcggttgttggttatatgtcacgggaaaatatt |
| | | ctgtgatgtagttgaaaataataattttaatgagagcttttccaatttaggctccagggattggag |
| | | cctttttattatcg (SEQ ID NO: 287) |
| 40 | 16 | actagctaagcaataagggcgatcggctctcccatagatcgaggccgaatgatgttagcaatgttc |
| | | actcttggctggaatctgccagaaatcgaggtcatatggtctgctttgagtgaggagcgcaaatgg |
| | | ataaagccctcatgagttctttttcaatgacctaacttttgagaggcactgggttagatcatgttt |
| | | catgtttgcaatacaatatatatttaaacttaggtttataacttaaatgttagttcctgatctaaa |
| | | ccagattattaatcactcctagagtgaaatgagttaagccaagagttgataaaattaacagttttt |
| | | tttacaatatctggatgtttgctagcgaacaggcatctaaaataactatgctgagctaaacttaca |
| | | attcaaattgtaccgaggataaaatgcaagtacaacatcatactgaaccaaacttgaagaatgaga |
| | | ttgtggctttatttaaggcttctcaattgatacctttttttggcagtggatttactagagatatta |
| | | gagcaaaaaatggtaaagttcctgatgctattaaatttacggagttgattaggaatatagcggcag |
| | | aaaaagaagggttaacacaaacagaaatagatgaaattctaagaatcagccagcttaaaaaagcgt |
| | | ttggacttctaaatatggaggaatatatacccaaacgaaaatcgaaggcattattaggtaacattt |
| | | tttcagagtgtaaactctctgatcacgaaaagacaaaaataataaatttagattggcctcatattt |
| | | tcacgtttaatattgacgatgctatagaaaacgttaataggaaatacaaaattctgcatccaaatc |
| | | gagcagttcagagagaatttatatctgctaataagtgtctattcaaaattcatggcgatattactg |
| | | aatttattaaatacgaagatcaaaatctgatatttacttggcgtgaatatgcacacagtatagaag |
| | | aaaataaatccatgctatcctttttatctgaggaagccaaaaactcagctttccttttcataggtt |
| | | gcagtcttgatggagagcttgatttaatgcatttatcaagaagcacaccatttaagaaatcaattt |
| | | atttgaagaaaggatatttaaatttagaagaaaaaatagctctttcggagtacggcatcgaaaaag |
| | | taattacctttgacacttacgatcagatatatcaatggttaaataacacacttcagaatgttgagc |
| | | gaaaatcccccacaagaagtttcgaactcgatgactccaagttaatgaaagaagaggctataaatt |
| | | tattcgctaatggaggccctgtaactaaaatagtggataataaaagaatcctgcgaaattctataa |
| | | ctttttctcaacgagatgtctgtgatgatgcaattaaagcactacgtaatcatgactatatcctaa |
| | | ttacaggtcgacgtttcagcggaaaatctgtacttttatttcaaattattgaggcaaaaaaagaat |
| | | ataatgcctcttattactcttcgactgacacattcgatccttccattaaaaactcattgataaaat |
| | | tcgagaatcatatattcgttttcgactctaatttctttaatgcacaaagcattgatgaaattttaa |
| | | ccacaagggtgcatcctagtaacaaagttgttttatgctcgagttttggtgacgcagagttatata |
| | | gattcaagttaaaggataaaaagatattacataccgaaattcagattaaaaataacttgattaatg |
| | | aagaaggtaactatctcaatgataagctttcttttgaggggctaccactttataaatcttcagaaa |
| | | cgttgttgaattttgcttatcgatactatagcgagtataaaaatagactaagtggttctaatttat |
| | | ttaataagcaatttgatgaagattcaatgtttgttttgattttaattgcagcttttaataaagcca |
| | | catatggtcatatcaacagtcacaataaatattttgatattcagaattttatttcgcaaaatgata |
| | | gattatttgaattggagtcaactaacacagatccaagtggagttataatctgcaattcaccatcct |
| | | ggcttttaagagttatcagtgagtatattgataagaatcctgcatcttataaaacagtatctgatt |
| | | taataatatctcttgcgtcaaaaggatttcttgcagcatcaaggaaccttataagctttgataaac |
| | | taaatgaacttgggaatggaaaaaatgtccataaatttatcaggggtatatataaggaaattgcac |
| | | atacctatcgtgaagatatgcactactggttacaaagggctaagtcagaattaatatcggcacaca |
| | | caattgatgacctcgtcgaaggaatgagttatgcaagcaaagtaagactcgatagtgccgagttta |
| | | aaaatcaaacttattacagtgccacattagtattagcgcagttgtctgcaagggctctatctataa |
| | | ataatgataaaatatatgcgctgagcttctttgaaagtagcctagaatccatccggaattataata |
| | | ataactcaaggcacataaacaaaatgatggataaaaatgatggtggctttagatatgcaatacaat |
| | | atcttaaggataatccattaatagaactccttcctcgtaaggacgaagttaatgaattaattaact |
| | | tctatgagagtcgtaagaaataatcatccttaaattaataaatggcaagtaactcattcccttgtc |
| | | atttattaaactcttaagagccttatcccgaaaagtattaatctgagctaataagattgtttttca |
| | | gctatgtcattattttattgccaatatatttacacttaagcattgacaggtagcggatagttattt |
| | | ttggcttgtaaataagccttttaataatagaactgtaagacaatcgctctgattttttgaaattta |
| | | tctcaatgttaaattcttccgcttttggcacaaacgggctagagcagacagatttaatgagataag |
| | | ggtatagatgaattctccatacccttgaacgattacttcccagttgatttgcttggtttcagtcct |
| | | ggggtattaccgggtgtatccttattatcacgtctgcgttgatcgggttttcctgttgattttgca |
| | | attggttttggaccaggtttaagccccataatcgtactccttagccatgtcagaggttattcctca |
| | | gtgtggatataaggggagcggtaagaattatcaagcttggatgggcggtgaaaaatgactacttga |
| | | ctattatgtgagcaatgtcagcttttgacatttagaggccagcccattactgaagtaagccaaaaa |
| | | tgagtcgcgatgagccctcaacaatgagggccacctcggagattg (SEQ ID NO: 288) |
| 41 | 17 | tattttgcgtagctagaacgcaatcaaatctagcagtccgctttgttcggagttcggacattatga |
| | | gttggcaagtaaagtagcttgctaggaagccggatttgcacggtcggtataataagatgtaacccc |
| | | ttgccttcatttactcgaatgaacgtgcacattggataggaggaaaaggaatgcaattcattacca |
| | | acggccctgatattcctgatgagcttttgcaggcgcacgaggaagggcgcgttgtgttcttctgtg |
| | | gagcaggcatttcctaccctgctggtttacctggtttcaaagggttggtagaactaatttaccaga |
| | | ggaacggaacaacactttcagaaattgagcgtgaggttttcgagcgtgggcaatttgacggcacat |
| | | tagatttgctggaacggcgcttaccagggcagcgtatagccgtccgacgcgcgttggaaaaagccc |
| | | ttaagccaaagctccgtcgtaggggcgctattgatactcaggcggcgctgttacgtttagcccgta |
| | | gccgcgagggtgcccttcgattggtcactaccaactttgaccgtctctttcatgtggcagctaaac |
| | | gtacaggccaggcttttcaggcctatgtagcgccgatgctgccaattccaaaaaacagccgctggg |
| | | atggacttgtatacctgcatgggctgttaccggaaaaggcggatgatactgccctgaatcgtctgg |
| | | ttgttaccagcggtgactttggcttggcttatctcactgagcgttgggcagctcgctttgtgagtg |
| | | agttatttcgtaactatgtggtctgcttcgttggctacagcatcaacgacccggtactgcgctaca |
| | | tgatggatgcgcttgcagcagatcggaggctcggtgaagtcacaccacaagtatgggcactggggg |
| | | agtgtgagccggggcaggagcaccggaaagccatcgagtgggaggccaaaggggtcactcctatcc |
| | | tttacaccgtaccggcgggctccactgatcattcagtgctgcatcaaacgttgcacgcttgggcag |
| | | atacttatcgagatggtatacagggcaaaaaggctatagtcgtcaaacatgctctggcccgcccgc |
| | | aggacagcactcgtcaggacgatttcgttggtcggatgttgtgggccttgtcagataaatcaggtt |
| | | taccagcaaaacgctttgcggaactcaatcctgcaccgccgctggattggttattgaaagctttct |
| | | cggacgaacgatttaaatacagcgatctgccacgcttttgtgtatctccgcatgtcgaaattgacc |
| | | cgaaactccgattcagtctggttcagcgtcctgcgccctatgagctggccccgcagatgtcgctgg |
| | | tttctggatgtgtcagtgctagcaaatgggatgacgtaatgtcccatatagcccgttggctagttc |
| | | gttatctgggcgaccctaggttgatcatatggattgctgaacgcggcggacaaatacacgaccgtt |
| | | ggatgtttctgattgagagcgaactagatcgcttagcagcactgatgcgggagcgtaagacttctg |
| | | agttagatgaaattctcttgcattcccccctggctattcctggtccacctatgtctactttatggc |
| | | ggcttctgcttagtggtcgtgtgaaatcgccattgcagaacctggatttgtatcgttggcaaaacc |
| | | gcttaaagaatgaaggcttgacgactacattgcgcttggagttacgcgggttgctttctcccaagg |
| | | ttatgttgaggcggccgtttcgctatagtgaagacgattcgagcagcactgatgaacccttgcgaa |
| | | tcaagcaattggtggattgggagctggtgctgactgctgattacgtacgttcaaccctgttcgacc |
| | | ttgctgacgagtcatggaaatcgtccttgccatacctgttggaagattttcagcagttgttgcgtg |
| | | atgcactggacttgttgcgggagttgggagagtccgacgatcgtcacgaccgctcgcattgggatt |
| | | tgccgtccatcactccgcactggcagaaccgggggttccgcgattgggtgagcctgattgaattac |
| | | ttcgggattcatggttagccgttcgagccaaagacagcgatcaggcctcgcgcattgctcagaatt |
| | | ggtttgagttgccatatcccaccttcaaacgtctggcactgtttgccgcaagccaagacaactgca |
| | | taccacctgagcggtgggttaattggttgttagaggacggttcatggtggttgtgggccacggata |
| | | ctcggcgagaggtattcagactgtttgttttgcagggacgacatctgacaggaattgcacaagagc |
| | | gtctggaaactgctatcttggcagggcctccgcgcgagatgtacgaggataatttggaagcagaca |
| | | ggtggcattatttggtggctcattccgtctggttgtgtctagcgaagctcaggggagcgggccttg |
| | | ttttgggagagtctgcggctacacgtttgacggaaatatccacagcatacccaaaatggcaactgg |
| | | caaccaacgagcgtgatgaattctctcactggatgagcggaaccggtgatccaggcttcgaggaga |
| | | gtatagatgtcgacattgcgccccgtaagtggcaggaattagtgcaatggctcgcaaagcctatgc |
| | | cagaaagactgcctttctatgaggacacttggagtgatgtttgccgtacgcgcttttttcacagtc |
| | | tgtatgcgttacgtaaactatcacaagatgatgtgtggcctgttggtcggtggcgtgaagctctgc |
| | | agacttgggctgaaccagggatgattttgcgttcgtggcggtacgccgcaccgttggtgcttgaca |
| | | tgcctgacgcagtacttcaggagatttcccacgctgtcacttggtggatggaggaggcttcgaaga |
| | | ccatcctctgccacgaggagattctactggccctttgtcgtcgggttctgatgatagaaacaagcc |
| | | cagagtctagcaccattcgaaacggaattgagacctatgatcctgtttctacggcgatcaatcatc |
| | | ccattgggcatgtcacgcaatcactgatcaccctatggttcaaacagaacccgaatgacaatgatt |
| | | tgcttcctgttgaattgaaaacacttttcaccaaattgtgtaatgtacagatagagctattccgcc |
| | | atggtcgggtgttgctggggtcgcggctgatcgcattttttcgcgtagatcgaccttggaccgaac |
| | | agtatctattgcccttgtttgcttggagtaatcccgtcgaagcaaaagctgtgtgggaaggcttcc |
| | | tctggtcgccacgcctgtatgaaccgttgctgatagctttcaagtcagattttttggagagcgcca |
| | | atcactattctgatcttggcgagcaccggcagcaattcgctattttcctgacttatgcagctctgg |
| | | gccctaccgagggatataccgtggaggagttccgaacggcaattagtgctcttccacaagaaggtc |
| | | tggaggtagccgcgcaggcgttataccaggcacttgaaggtgcgggcgatcagcgcgaggagtatt |
| | | ggaaaaatcgtgtccagccattttggcaacaggtttggccaaagtcccgcaacttggccaccccac |
| | | gcatatccgaatcgttgactcgtatggtgattgctgcccgaggtgaatttccggcggctttggcag |
| | | tggtgcaggactggctgcaaccgctcgaacaccttagctacgacgttcgccttttgctagaatcag |
| | | atatttgcagccgatatcctgcggacgctctatccctgctgaatgccgtgattgccgaacaacact |
| | | gggggcctcgagagttggggcaatgcttgcttcaaattgttcaagctgctccacaactggagcaag |
| | | atgttcgttatcagcgattaaatgaatattctcgaaggcgcagcgtgtgaaagtgacaggcgttgg |
| | | acagtgcgaactgtggagcctaacaaggtaaagacactctaactgataatgctgcgccgctcgtgc |
| | | aatgcaatacagtttttatctagcggtgaattatggtgttaaaagttagcccctgacacagggtgg |
| | | gtagttggctctgtgtcattgatgggtattagttctgatatgagctaataccca |
| | | (SEQ ID NO: 289) |
| 42 | 18 | gtaagacaagggttgagcaggctactaatcgttacacaggctaacaaaggcatattaagacgattt |
| | | gtagcgctgtaaccttgaaaattatgtacaagcgccccgcattacgtcgttttaaaggccatcgga |
| | | ttcaggcccgacgcggcttcacgcgattataaccgtgaaaaatcccccccgcatagaacctgaatt |
| | | atccccgccgccgcgcagaactgacagcgcttcagaaccgttaaccctctcagaaatcccgctttt |
| | | ttactgtaaaaaaccatgcataaggtgcatggttttgcatgcgtttcaccgacactgaatcccccg |
| | | ccagcgccagcagtagcgtgccctgaggccgttaatgcacccgtattaaaagcgccctgttaagcg |
| | | agcaggcggggcggggcgagcattgcgcgtcggtgttaccaattctatatggacattgagcaattc |
| | | aaatataataaaggttgggtatatttcgtcctcaacgatgtcaaaaactgcaaaagcgtattataa |
| | | ttcagatcattttcagaccacctattttaatcatgcatgcaaaatggaatatgtgatgacaaataa |
| | | aaacaaaatcaaaccattattaaataatatatccgctcgcctttgggatggtcgtgcagctatatt |
| | | gataggagctgggttcagtcggaatgcaaagccattaacaagcaaggcaagaaagtttccaatgtg |
| | | gaacgacttaggtgacattttttatgaaagtgtttactgcaaaaaaaacgacaatagatattcaaa |
| | | tgtattgaagctaggagatgaagttcaggctgcatttggtagagcgacacttgataaattaatcat |
| | | ggatcatgttccagataaagaatatgaaccatccaaattacatgtttcccttctttccttgccgtg |
| | | gattgatgtttttacgactaattatgatacattacttgagcgagcaagtgttaatgtcgactccag |
| | | aaaatatgacattgtccttaataaaaatgatttaatgaatgctgaaagaccaagaattataaaact |
| | | gcatggtagcttcccatcagaaaggcccttcatagttacggaggaagattacagaaagtatccttt |
| | | agaaaattctccttttgtgaataccgttcaacaatcattgattgagaatactctatgtctgatagg |
| | | attttcgggtgacgatcctaacttcttaaattggattggttggataagagataatcttggcacaga |
| | | aaattcacccaaaatatacttgatcggtcttttttcatttaatgaagcacaacgtaagcttttaga |
| | | aaaaagaaatatttccattgttgatttaagttttctaggtgattttggcaaggatcattatctagc |
| | | acaccaacgctttatccaattcttatacgaatcaaaaaatcgagacaacctaatagagtggccaat |
| | | agaaaccaattatgacagaattgtttttaatgatggcattgaattaaaaactgagaaaattaaaaa |
| | | gtgtatcttagaatgggctcagtcaagacaatcatacccgaactggcttattttgccggaatcaaa |
| | | cagaagtaatttatggcaaaacactatagattggttatctgttgctaattatgatgtcgcttggga |
| | | tggttctgatgatcttgattttggatatgaaattacatggcgactaaataaagctttgctaccaat |
| | | tttcaatgatacatcagaattcttatttaagttgattgaaaaatatgagatcaattacgtttcggg |
| | | gataaataataaaatcattgactttgatgaaaaatactctcatataaccctcagtttaatgagatt |
| | | ctgtcgacaagaaaaccttattgataaatggaagaatctaaacgatttattaattcaaaatcttga |
| | | tcgattaacaccagaggtaaaatctgattattattatgaaaatatattattttcatacttcaattt |
| | | aaacttcgatgaagccagaaacaaactctccaactgggaaacgaataaactcctcccccatcatga |
| | | aataaaaagagcaggattacttgccgaatttggaatgcttgatgaagcaatcaatcttcttgaaga |
| | | aactttatctacgattcgaagaaacagtttgctttcatctagaaacattgactattccagtgaatc |
| | | tcaagaagcatatggaatctatattttgcgaatgtttaaacggagtttgcgtttagatagcaaaga |
| | | tgacgattattcatctgagtataactcgcggttggctacattatcacaatatcgcagcgatcctga |
| | | aaacgaaataaaatacctagaaattaaactagagtcactaccaggtaccttcaagaataccaatga |
| | | cacggatttcgatcttaacaaaagaacggtgaccacttatttaggaggaagcccaacagaagtgag |
| | | gtcattagatgcttttagtttctttctactggcagaggaacttggcctccctttccacataccagg |
| | | aatgaacatttttagtggaatagttgagaatgcagctcgacatatttatcaatactctccagagtg |
| | | ggctattttttcaatatttagaacatttaacaaggataaggccaagagtctattcaatcgaaatag |
| | | aatttcgtctcttgagcgaaaaaaggttgaagatttatttgatggatactacaaaaaatatgagca |
| | | aattatcacaaaaaaaatagaagatagattaaacgataaacttgagatagaaatttctacgctatc |
| | | aatcattcctgaaattctttcccggctagttacaaaagtatcatttaataaaaagaaagacattat |
| | | tcaccttttgcttaaactgtttaactcggataattttcatcaatacatggagactaaagatctatt |
| | | aaagcgcactatttccaatttgagcgacttacaaaagatctcactaatagatattttcattgattt |
| | | cccctccgcgcctcccaatacccaattacatatgggtcaaagatacaacttccttactccatttga |
| | | atgtctattaggggttacaataacccccccaaaagaaaactctaaaaaaatcgcatctgcaaaatt |
| | | aaaaaaagatataaacgatttaaaaagtgataatttagacttgaggaaagctgtatcacaaaagct |
| | | cataacattatataacctagaaatgcttaacaaatctgacacgactaaacttataaaaaacctttg |
| | | gtcaaagcgtgataactttggattcccaataggcagtggttactataaatttttctttataaacaa |
| | | ccttaacccagataatgaaaatatagccgacaaattcatttctataattaaaacatacaaatttcc |
| | | tgtgcaagaaggaaaaagagttagtattacaggtgggttagatgagtattgtactgaactcaatgg |
| | | agcgctacaccatataagtcttccagagaaaaccctatctgaaataatttcaaaaatacatgactg |
| | | gtatgtcaaggatcgggcctggcttgaaaaaagagatgatttagccaaggagttcactcttagatt |
| | | cagaaatatcacaaatatcataacgacaattttagaacaccataaggacaaattacatgctgaatc |
| | | tataaatgaaatatcaagcctactagataaaatgaaagaagacaagatacctgtaaactcagcagt |
| | | aacaatgctttgtctgaaaaataaaagcacttacctcgagagaataaaagatatagagaatggact |
| | | atatagctttaataaagatgatgttattgaagctatcaactcaacttatgtctttattagaaacaa |
| | | tgaatttccactaaccatcattcaagctatcagcgataaaatcgcatgggatagaaaccctcgcct |
| | | tcctgattgctacaatttaattgcatatataattaactcgtgtgaatttactcttccagattattt |
| | | aatagagaaaatccttcgagggctggcatatcaaataaacattgatgatagagattttgttgataa |
| | | caatgaatatttgaatcaccttgagaaaaaacttagtgcaacaaagctggctgcttctatgtttag |
| | | aaaaaatgaaacactaggtattgaccaaccttctatcattcaagagtggaaaaacatgtgcaactc |
| | | tagaaatgagttcgatgaaattaggaatgaatggaacaacaatatataaataaaggaagaacaccc |
| | | aatttatattgggtgttctgttcacgaaacccttttaccataatcgaatggcaatataaattgaga |
| | | ttgaaatttattctcatctaattaatcagcccaccattg (SEQ ID NO: 290) |
| 43 | 19 | tagctattgtgactatgctaaccatatgaatctattgtgtgattatgagtaatgactttttctaat |
| 44 | | atttgatttttaatgtagtaacttagctaattttaaaatttgtaaaaggatgtttatgtcgattta |
| | | tcaaggtggtaacaagttaaatgaggatgattttcgttctcacgtttattccttgtgtcaattaga |
| | | taatgttggcgttctgttaggtgctggtgcttctgtcggttgtggtgggaaaacgatgaaagatgt |
| | | atggaaatcgtttaagcaaaactaccctgagcttttgggagcacttattgataaatatcttctggt |
| | | ttcgcaaattgattctgataacaatttggtcaatgttgaacttttgatagatgaagcaactaaatt |
| | | tctttctgtagctaaaactagacgatgtgaagatgaagaggaggaattcaggaaaatattaagttc |
| | | attatataaagaggttacgaaggctgcattattaacaggagaacagtttagagagaaaaatcaggg |
| | | taaaaaagatgcgtttaaatatcacaaagagttaatttcaaaattaatttcaaatagacagcccgg |
| | | tcagtcggctccggcaatttttacaacaaattatgatttggccttagagtgggctgcagaagattt |
| | | aggaatacagttgtttaatggtttttctgggctacatacacggcagttttatccccagaattttga |
| | | tttggctttcagaaatgtaaatgcgaagggcgaagcaagattcggacattatcatgcgtatctcta |
| | | taaattacatggctcacttacgtggtatcaaaatgatagcttgactgttaacgaagttagtgcatc |
| | | tcaagcatatgatgaatatattaatgacataatcaataaagatgacttttatcgcggtcaacattt |
| | | gatttatccaggggcgaataaatatagccatacaatcggcttcgtttatggagagatgtttagacg |
| | | ttttggggagtttatttcgaaacctcaaacagcgttgttcataaatgggtttggtttcggtgatta |
| | | tcatataaatagaataatattaggcgcgttactgaatccatctttccatgttgttatatattatcc |
| | | tgaattgaaagaagcaattaccaaagtaagtaagggtggtggttcggaagctgagaaagctattgt |
| | | tactttaaaaaatatggctttcaatcaagtaactgtagttgggggaggaagcaaggcatattttaa |
| | | tagtttcgtagaacatctaccataccctgtgctctttccacgagataatattgttgatgagttggt |
| | | tgaagcaattgctaatctttctaaaggagaaggtaatgtccctttttaaacttactgaaatctcgg |
| | | ctattggatacgttgtaggattagaaggggaaagaattaggataaacctgcatgaggggttgcaag |
| | | gcagattagcatcgcatagaaagggggtgagctcagtaacgcaaccaggagatcttattgggttcg |
| | | atgcaggtaatatattagttgtcgcaagagtgacagatatggcatttgttgaagcggataaagcgc |
| | | ataaggcaaatgtaggcacatctgatttagctgatatacctctaagacaaattatcgcctatgcaa |
| | | ttggctttgtgaaaagggagttaaatggttatgtttttatatcagaagattggcgcttacctgcat |
| | | tgggttcttctgctgttcctttgacttcagattttttgaacatcatttatagtattgataaagaag |
| | | aactcccaaaagcggttgaattaggtgtggattctagaactaaaaccgttaagatatttgcaagtg |
| | | ttgataaattattgtcgcgacacttagccgttcttggtagtacaggatatggtaaatcaaatttca |
| | | atgctttgttaacgaggaaggtttctgaaaaataccctaactcaagaatagttatttttgacataa |
| | | atggtgaatacgcgcaagcttttacaggtattccaaatgtaaagcacactattctaggggaatccc |
| | | caaatgttgatagtttggaaaaaaagcagcaaaagggtgagctatatagtgaagagtattattgtt |
| | | ataaaaagataccatatcaggcattaggttttgctgggttaattaaattattaagaccaagtgata |
| | | aaacacaattgcccgcattaagaaatgcattaagtgcaattaatcggactcattttaaaagccgta |
| | | atatttacttggaaaaagatgatggtgaaacttttcttttgtatgatgattgtcgtgacacaaatc |
| | | aaagtaaattggctgagtggttggatttattaaggcgtagacgtcttaaaagaacgaatgtatggc |
| | | caccgtttaaaagtttagcgactttggttgctgaatttggatgtgtagctgctgaccgttctaatg |
| | | gaagtaaacgtgacgcgtttggttttagtaacgtgttgccattggtaaaaatcatacaacaacttg |
| | | cagaggatataagatttaaatctattgttaatttaaatggagggggtgagctagcagatggtggaa |
| | | cgcattgggataaagctatgagtgatgaagttgattacttctttggtaaggaaaaaggacaagaaa |
| | | atgattggaatgttcatatagttaatatgaaaaatttggcacaagatcatgctccaatgttactta |
| | | gtgcattgttggagatgtttgctgagatactatttagacgtgggcaggaacgttcgtatcctacgg |
| | | tacttttgttggaagaagcgcatcattacctgcgtgacccttatgctgaaattgactcacagatta |
| | | aagcatatgaacgacttgctaaagaaggtaggaaattcaaatgctctttaattgtcagtactcagc |
| | | gaccctcagagctttctcctactgttttggcaatgtgttcaaactggttttcgttacgtttgacta |
| | | atgaaagagatttacaggctctcagatatgcaatggaaagcggtaatgaacaaatcttaaaacaaa |
| | | tatcaggtttaccaagaggtgatgctgttgcatttggttctgcatttaatttgcctgtaagaattt |
| | | caattaatcaagcaaggccagggccaaaatcttcagatgctgttttttctgaagaatgggctaatt |
| | | gtacagaattacgttgttaattacctgatgtacatggctagtgcaagttggtagcgcatgtctata |
| | | tgcatttatttgcatgtgttttattgagtgagcgcacaagcttgatgacccgacaggtatgtattt |
| | | agactgaa (SEQ ID NO: 291) |
| 45 | 20 | gtgcgccttatgtgattacaacgaaaataaaaaccatcacaccccatttaatatcagggaaccgga |
| 46 | | cataaccccatgagtgcaatagaaaatttcgacgcccatacgcccatgatgcagcagtattgaaaa |
| | | atataacatatccaactgattgtattgaaaatttaaaatagccatataacaaaaggttacacataa |
| | | gctactttttggggtttcaggcaagaaactaaaaattattaacgccatcaaattattcacatctta |
| | | ataattagcattgaaatttaatgtttttggttctttgtacatgtcaatggcttgtctttgtggcag |
| | | aatcataaagctatgcaatcattgcattgttattaacacagcatatttttatatacttttaacacc |
| | | ttacctcaaaaaggataacaaagtggacagaagtgcggttgatacaattcgtgggtattgttatca |
| | | ggttgataaaacgattattgagattttttcgttaccacaaatggatgactcgattgatatagagtg |
| | | cattgaagatgttgatgtctacaacgatgggcatttaactgcgatacaatgcaaatattatgaaag |
| | | taccgattataaccactccgttatatcaaagcccataagattaatgttgtcacactttaaggacaa |
| | | taaagaaaaaggggctaattattatctttatgggcattataaatccggtcaagaaaagttaacact |
| | | cccattaaaagttgactttttcaaatctaatttcctcacctacaccgaaaaaaaaatcaaacatga |
| | | ataccatattgaaaatgggcttaccgaagaggatctacaagcctttttggatcggttagttataaa |
| | | tatcaatgcaaaatcatttgatgatcaaaaaaaagaaactatacaaataataaaaaaccatttcca |
| | | atgtgaagattatgaggcagagcattatctttattctaatgctttcagaaaaacatatgatatctc |
| | | ttgtaataaaaaagatagaaggataaaaaaatctgattttgttgaaagtatcaacaaatcaaaagt |
| | | cttatttaacatatggttttatcaatatgaaggaagaaaagaatatttaagaaaattaaaagaatc |
| | | tttcatacgcagaagtgtaaacacctcaccttatgctcgttttttcatcttagaatttcaagacaa |
| | | aactgatataaaaacagttaaagactgtatatataaaatacaatcaaattggtctaatttatctaa |
| | | aagaacagatcgaccatattctccttttttactttttcatggcaccagcgatgccaatttatacga |
| | | attaaagaatcaattattcaatgaagatctaattttcactgatgggtacccttttaaaggaagtgt |
| | | atttacccccaagatgttaatcgaaggtttttcaaataaagaaatccacttccaatttatcaacga |
| | | catagatgatttcaatgaaacactgaacagtattaatataagaaaagaagtttaccagttttatac |
| | | ggaaaactgccttgatatcccatcccaactaccccaggtaaacatacaagttaaagactttgccga |
| | | cataaaggagatagtgtaatgagcaggaataatgatattaatgcagaagtagtatcggtatcgcca |
| | | aataaattaaaaatttccgtagacgatcttgaagaatttaagatagcagaagaaaaattaggtgta |
| | | ggatcttatttaagggtttcagataatcaagatgttgctcttctggcgatcatagataatttttct |
| | | attgaagttaaagaaagccaaaagcagaaatacatgatagaagcaagtccaataggtcttgttaaa |
| | | aatggaaaattctatcgcggtggagattcacttgcacttcctcctaaaaaagtggaaccagcgaaa |
| | | ttagacgaaataatatccatatactcagatagtatagatataaatgaccgttttactttttcaagc |
| | | ttatcgcttaataccaaagtatccgtacctgtgaatgggaatagatttttcaataaacatatcgct |
| | | atcgtaggttcaacgggttcaggtaaatcccacactgttgcaaaaatacttcaaaaagccgtagat |
| | | gaaaagcaagaaggttataagggattaaacaattctcatataattatttttgatatacattctgaa |
| | | tatgaaaatgcattccctaattcaaatgtattaaatgtagatacattaacccttccatattggcta |
| | | ttaaatggtgacgagttagaagagctttttcttgacacggaagcaaatgatcacaatcaaagaaat |
| | | gtgttccgtcaggcaataacattaaataaaaagatacattttcaaggagatccagccacaaaggaa |
| | | ataataagctttcactcgccatattatttcgacattaatgaagtcatcaattatattaacaataga |
| | | aataatgaaagaaaaaataaagataatgaacatatttggtcagatgaggaaggaaatttcaagttt |
| | | gacaatgaaaatgctcataggttattcaaagagaatgtaactcctgatggaagttcagccggtgct |
| | | ttaaatggaaaacttctcaattttgttgatcgattacaaagtaaaatatttgataagagattagat |
| | | tttattctgggtgaaggtagcaaatccgtaacatttaaagaaacattagaaactttaataagctat |
| | | ggaaaagataaatcaaacataacaatacttgatgtaagcggtgttccttttgaagtacttagcata |
| | | tgtgtatcattgatatctcgattaatttttgaatttggctatcattcaaaaaaaataaaaagaaaa |
| | | tctaatgaaaaccaagatatcccaatattaattgtttacgaagaagcacataaatatgctcccaaa |
| | | agtgatctgagcaaatacaggacatccaaagaagcaattgagaggattgcaaaagagggtagaaaa |
| | | tacggagtaacccttctccttgcaagtcagagaccttctgaaatttcagaaacaatattttctcag |
| | | tgtaatacttttatctcaatgcgattaactaacccagacgatcaaaattatgttaagcgattactc |
| | | ccggatacagtaggtgatattacaaacctcctaccatcgctcaaagaaggtgaggccttaatcatg |
| | | ggggattcaatatcaataccttcgattgtaaaaatagaaaaatgtacaatacccccatcgtcaatt |
| | | gacatcaaatatcttgatgaatggagaaaagaatgggtagattcggagtttgataagataattgaa |
| | | caatggagtaaaagttaatttcagaagtggattcactcttgctcaagagtgaatccactaatatca |
| | | tatcctaatgatatagtttaataaaatctattctggaatcattaggctgagag |
| | | (SEQ ID NO: 292) |
| 47 | 21 | accgtgctggcatgtttttacggagtgacgctttcattaacctgtacacgaacttctattccggca |
| | | tcatgacaggcctgcagccactgcgccacttccagcggatcgccctcccggcgtaccactctgcct |
| | | tctttattccataactgcagacaggtgctgccgtcgagacgcaccacaaaatccccacggcaggcc |
| | | tgataggggtttgagggccaaccgtacgaaaacgtacggtaagaggaaaattatcgtcttaaaaat |
| | | cgatttatgctatcacagtcgtctcttcaggtaagtacggttgcctttgcctgctttcttctcgtc |
| | | tggttaagttaagaaattcagagatccatgcttgagataaaagcggaataaaaccagtaaaatgta |
| | | actaaaacaacaacggaattgtatcaatgataatgtccacaccgtggctgacaccgatcgttgccg |
| | | atagtgatcatgctgaggcaaatgcagtgagctatgaagcactgactccgacagaactcgactcag |
| | | ataaagcaggctgttatatcagcgcgcttaattatgcttatgaacatccggatatccggaatattg |
| | | ctgttaccgggccgtatggggcagggaaaagctcagtattaaaaacatggtgcaaagctcacaatg |
| | | ggacactgcgggtgttaaccgtttctcttgctgattttgatatgcagagacatgtggatgaaagta |
| | | atggggacagcagtagtgacgaagggacgaaaaatactggtagtgttgaaaaatctattgaataca |
| | | gtattctgcaacaaatactctacaaaaataaaaagcatgagcttccctgttcccgcattgaccgta |
| | | tatcagatgtgactgcgggacaaatattgcggtctgcgtcttttctgacaggaaccattttactga |
| | | gtggagctgctttatttttccttgcgccggattacgttacaacaaagctatctttgccgggagcat |
| | | tcgcccgttaccttcttgaatgcccgtttggggtgcgtgtgtccggtgcagtggcatctgtgatgg |
| | | gatcgttatgcctgcttttgaaccagttacatcgtatcggtatatttgacaggaaagtaagtcttg |
| | | ataaagtggaccttctgaaaggcgctgttacaacccgggcatcatcaccttctttacttaatgtct |
| | | atattgatgaaattgtctatttttttgattcgactaaatatgatgtagtgatattcgaagatcttg |
| | | accgttttaacaatggccggattttcgtgaaattgcgggaaatcaatcaaattattaataactgcc |
| | | tttctgacagaaaacctgtaaaatttatttatgctgtcagagatggtattttcaactcagcagagt |
| | | caagaacgaaattctttgattttgttatgcctgttattccagtgatggataaccagaatgcttatg |
| | | agcattttgttaaaaaattcaaagaagaagagataaataataacttaagcgaatgtatttctcgta |
| | | ttgcgacatttattcccaatatgcgtgtaatgcataatattacaaatgagtttcgactctatcaga |
| | | atttagtcaatagtcgggaaaatctggccaaactacttgccatgatagcatataaaaatctctgtg |
| | | cggaagattatcatggtatagatagtaaaaaaggtgttctttatcattttattcaaagctacttag |
| | | accatgaaattcagaatgaattattacattctgcaaataacgaacttgaggatatggcacagtcac |
| | | ttgtagcgataacaaatgaaaaactcgcaaaccgggaaaatctgcgcgaagaactgctcatgcctt |
| | | accttagtaaaaattatagcggcgcgcttgttttttatacagaaggaaggcaaataagtcttgatg |
| | | atttgatacaagatgaagatgaatttctcatgcttttagataaggaaaatattcaggtcgttaccc |
| | | cctataacagacaaaattttctcatgataaatcagcgggatacagaaaaactgaagcagcagtatg |
| | | aaaaacgatgccatttaattgaaactaaatctgttgataatataaccagagtgaaaaataatattt |
| | | ccagtctggagtcattgaggaccgaaattctttccggaactgtagctgatatagcagaaaagatga |
| | | caaatgaaggctttgttgcctggataaagaagaaagaggatacaggtgtcctgacgattcagtcgg |
| | | aacatgaacagattgattttatattttttctgttatcaagtggttatttatcaacagattacatgt |
| | | cctatcgctcaatcttcattcccggagggctgagtgagacagataatttatttcttaaggatgtta |
| | | tgtctggtaaaggtccggaaaaaacattctcattccatcttgataacgttaataatattgttgaac |
| | | gactcaaaaagctgggggttctgcagcgtgacaatgctcaacatcctgctgttatcagatggctga |
| | | ttgataatgaccctgataccctgaaaaacaatataatggcattactgagtcagacgggtagccagc |
| | | gtgtggttagtttgctgatgttgatgcagaacgatttcacaacgtatgttcgcctgcgttacctgg |
| | | agatttttatgtcagatgaacatatactgaacagattgctggcacatttatgtgcgtcagaagaac |
| | | gcacacccgagcaaaagttttttgttcaggaaatagcggcacacctgttatgcctgactgaaaaat |
| | | caaatatctggcaatcggttgagattaataaacgtatcggtgagcttatagattcctccccaattc |
| | | ttattactgctgtgccaaaaggatatggtgatgcgttttttgaagtgttgaaagataatacacttt |
| | | cagtttcatatattccaggtgatgtgggagacgagaagtgttctgttatcaggaaaattgcgggtg |
| | | caggattattcaaatattccgtcagtaatcttaaaaatgtttatctttgcctgacgcaagacaaga |
| | | atgaagaaagaatgtcattctctctttatccgtttcattgtctcgagtccctggctatttctgaat |
| | | taacagaaattctgtggactaacatagaagattttattttatcggtatttattgaatcggaagaga |
| | | ttgatcgtattcctgaattgctgaattcttctgaagtctcaatgactgttgttgaacagattatag |
| | | ccaaaatggatttttgtataaataatctggatgatattattaatcgttcagagtgtgcggacaata |
| | | atgcttcagggagaaatatctatagcatgctgttgcagcatgacaggatttttccatcctttgata |
| | | atattattcatttattgcatgatacatcaattaatacttccggtgaacttgttcagtgggtaaatg |
| | | agaaacactttgaatttgaaccatctgatatagtcataaatgatacaggaatatttaataatttta |
| | | tttctgaattaatttgctcgccagtcatttcagaagaagctttactgaaagtactgagtaatttaa |
| | | acgttgttattatcgatgtgcctgaaaacattccattgcgaaatgctgaactgttatgttcagaga |
| | | aaaaactggcaccgacagttaatgtctttacggtgttgtttaatgctctcagtgaaaatgttgatg |
| | | atattaacaggatgaatactctgcttggtaaccttattgcccagcgtcctgagattattacccagg |
| | | agccagaagatattttttatatcgagggtgactttgatgaagaactggcaagcgaactttttcgtc |
| | | acaagctaatcggtatgaatataaaagttgccgctttacgctggttgcgtgataacaaaccgggaa |
| | | ttcttgataagagctacctgctgtcattagatattctggcagaactgagtccctggatgggtgacg |
| | | atgatctgcgcctgacactgcttaaacgttgtctggttgccggggatgctggcaaagacgcgcttt |
| | | gcgtggtgctgaacagttttgctgatgagagctatcatggactgttaccacatgacaggttcagga |
| | | aaatccctcactccgtggatttgtgggaagtggccgaattaatcagcaatcttggatttattcagc |
| | | cgccaaaaatggggtcagggcgtgatgaacacaaaattgttattactcccgtacgctatgtccgtg |
| | | atgttgagttttatgactgagcatcattgatacggtgttttaattgccttaaatacaaaaataaaa |
| | | acagattaatgcttaatgtgcattaatctgttttagttatcaatggctgttaattattgttaattt |
| | | tacattaatctttctttttcttcaggaagatccgaaaactcctggtcacggatcttcct |
| | | (SEQ ID NO: 293) |
| 48 | 22 | gaaattatttggaatggatgatggcgcttgattactggaacaggtctatgacatgaaggttatgat |
| 49 | | ttgttcactgctatgaggttaacactttaacaatttcccttactattcttgtactaattccttcca |
| 50 | | aatacttctgcttgagattaggatttatcctcttgtagtgttatttacaataaagattgtgatgct |
| 51 | | gatttaacccaacgtgttgtcagttgccttgctgaactaagttcagtatctagaaattagctcttg |
| | | atacatgagcgaatcagcgaaaattttcatcccgaccaattaatgaccgtaatggataggatgttg |
| | | ctgctatttggcttccatgagggaacatatgtttttaaacgatcaagaaacgtccactgacctgct |
| | | gtactacaccgctatcgccagcacagtggttaggcttgttgatgaaacgtcagatgcacccattac |
| | | gattggtgtgcatggtgattggggggcgggaaaatcaagcgtactaaaaatgcttgaggctgcctg |
| | | cgagaaaaaggataaaacgcactgtatctggtttaacggatggacgtttgagggattcgaagatgc |
| | | taaaactgtaatcatcgaaaccatcgtcgaggatcttgttgcctcgcgcccgatgagcaccaaggt |
| | | ggcagaagcagcaaaaaaggttcttcgtcgaattgactggttgaaaatggccaagaaagcgggggg |
| | | actggcgtttaccgcatttactggcatacccacatttgatcagattaaggggatgtacgaactggc |
| | | atccgactttctaagtgctccgcaggacaagctttctgctgcagatttcaaagcgtttgctgaaaa |
| | | agcaggaggcttcatcaaagaggccgatactgatagtaatacgctacccaaacatattcatgcttt |
| | | ccgtgaggagttcagggcgctgcttgatgctgctgaaattgaaaagctagtggtgatcgttgacga |
| | | tcttgatcgctgcctgcctaaaaccgcgattgaaacgctcgaagctattcgccttttcttgtttgt |
| | | agagaaaactgcatttgttatcggtgcagatgaagccatgatcgaatatgcggtaaaagaccattt |
| | | ccccgacctgcctcaaagcaccgggccggtaagttatgcacgcaactatcttgaaaagctcataca |
| | | ggttccatttcgaatccccgcactgggaactgcagaaacgcgtatatataccacgttgttgcttgc |
| | | agaaaatgcgttgggttcggaggacgacaattttaaagcattgctcaataaagcacgggaagagat |
| | | gaagcgtccttggatcagccgcgggcttgacagagaggcagtgatggcagcgttaaatggaaagat |
| | | tccggaggttgtggaaaacgcgctgctattcagcctacacgttacccctatgcttagttcggggac |
| | | acatggtaatccaaggcagattaaacgctttttgaactcaatgatgttacgccaggcgattgctga |
| | | tgaacgcgggttcggtagtgacattaagcgtcctgtactggcaaaaattatgcttgctgagcgttt |
| | | ttaccccagcgtatacggaaagcttgttcagcttgtatctaatcatccagagggaaaaccggaagc |
| | | tttggcggagtttgaagccttggtcagaggggggaaaactgctccgaagagtcgcgctgacagcaa |
| | | agagaattcctcagagtctgaagacgtccaaaactggctgaagattgattgggcgatcggttgggc |
| | | aaaagcagagcccgcactttctggagaggatcttcgtccatatgtgtttgtcactcgtgacaaaca |
| | | cagtactttgagtaatctggtcgtatcaagccatctcattcctataatggagaaacttcttggtcc |
| | | gaaaattgggatggtgaaaatcaaaggggatttagagaaactgagtccaccggatgctgatgaatt |
| | | attcgaaatgcttagcgataagcttttccaagaagacagtttcaatcgaaaaccaagaggatttga |
| | | cggcctcgaatatctcgtagaaacacaacctcaccttcaaaggagattgattgattttgcacggcg |
| | | cattcctgtaaaaaaagcagggggatggcttgctacccgtattgcgcaaagcctagtggaccctac |
| | | gttaatagaagaatatacaaaactgatccaagaatgggcgagtcaggacgaaaatctgtccctctc |
| | | taaatcagcaaaagcaaccctccagttatcgggatatcaacattaatgggaacctcaaaagcttac |
| | | ggggggcctgttcatggcctaatccccgatttcgtggagaatccatctccaccgaccctgccgcct |
| | | gttgaccctgcggatgatagcacgctggatacgccgctcattccaccggattcgagtggctcaggg |
| | | ccacttagcacaccgaaagcaaactttactcgatactcccgttcaggaagtcgtagttctctgggt |
| | | aaggcggtcgctggatatgtccgcaatggagtggggggcgcaggcagggccagccgccgtatgggg |
| | | gcctcacgcgctgcagcagggggactgctcggtctcatcagcgactatcagcagggaggtgctact |
| | | caggctcttgagcgcttcaatcttggtaatttggcagggcagtctgcatcgactgctcttctctcc |
| | | cttgttgaatttttatgccctccaggtggttctgttgacgagggggttgcgcggcaggctatgcta |
| | | gagaccatcgccgatatgtctgatgtaggagaggagaattttgatgagctcactcccgatcaatta |
| | | aaagaagtctttattggtttcgtggttcactccattgaagggaggctcatggcggatattggtaaa |
| | | aatgggatcaagttaccagacgacatagacgctatcgtcagtatccaggaggacctgcatgatttt |
| | | gttgatggagctactcgtacacagctccgtgaggagctgaggaatcttacagggctttcaggggat |
| | | gctatagacagaaaagtggaggagatttacaccgtggcatttgaattacttgcccgagaaggggag |
| | | agattggaatgagccatcataccttagttgcccgtttgggcactgacgataactccgatttacagc |
| | | tcagccgccaaagcacgcatctgacagaaattaattttctcaaagagaacggtaaactggatttcg |
| | | gtctcgggcaggcgctgaatggtttgagtgatcttggtttaacgccaatggatgtctccgtggatc |
| | | tggcactactggccgcaacggtgactgcggcggacacccgaatctcacgtgggcataacgctcaag |
| | | atctgtggacgcgcgaaattgcactttatatcccggtagcttccccgacattatggaatagtcaga |
| | | ctggattgctcagcaggatgttgaattttcttaccggcgaccgttggacaattcatttccgctcgc |
| | | gccctgttattgagcacgggctcattcagcgatcctctaaggaacgttcggtgaaccctacttctg |
| | | tttgcttgttttccggggggctcgacagcttcatcggtgccattgatttattatctaatgggggaa |
| | | ccccccttctgatcagccactactgggatacgactaccagcgtttatcagcagaagtgtgctcagc |
| | | tgctgtcggagcgatatggacaatcgttcagccatgtgcgagctcgtgttgggtttgaaaaaacaa |
| | | cgattgagggagaagatggagaaaacacccttcgtggccgctctttcatgtttttctcgctcgcga |
| | | caatggccgcagacgccctcggcgggccggtcacgataaacgtccctgaaaatggtttgatctctc |
| | | tcaacgttcccctcgatccgcttcgtgtcggagcgctaagtactcggacaacccatccgttttaca |
| | | tggcgcgttttaatgagctgctgggcaaccttggcatcagtgcacatctggaaaatccctacgcct |
| | | acaaaaccaaaggtgagatggctatccattgccatgaccatgcttttctaaggcaacacgcggctg |
| | | acaccatgtcatgttcgtctccgcaaagtacgcgttggaaccctgcgctgaatgagcagcaatcaa |
| | | cacactgtggccgatgtgttccatgcttaatcaggcgagcatcattgtttacagctttcggcacgg |
| | | acgatacgatttaccgtatcccggatctccgtagccgggtactggacagctctaagcctgaaggtg |
| | | aacacgttcgggcatttcaatttgctctggcaagattggcgcgatcaccgagtcgagcaaaatttg |
| | | atattcacaaaccagggccgctcagcgactatcccgactgcttagctgagtatgaaggtgtttatc |
| | | tgagaggaatgaaagaagttgaacgcctgctgagtggagtcataacgaggccccttacatgaaatt |
| | | agcaggacagaagcccgctccacaatgggtcgattttcactgtcatctggatctataccccaatca |
| | | ctctgcactcatccgtgaatgtgacatttcacgtgttgccacgctagcggtgacgacaacccccaa |
| | | ggcatggatgcgtaaccgggagttaacttccgattctccttatgttcgtgtcgcacttggtctaca |
| | | tccccagctgattgcggaacgtgagcatgagatagcgttactggagcactatctcccttctgcacg |
| | | ttacgttggggagatagggcttgatgccagcccgcgcttttatcgcagctttgaagcacaggagcg |
| | | gattttttcccgtattctgaatgcctgtttcgagcagggggataagattctcagcatccacagcgt |
| | | tcgcgctgcagccaaagtgttgggacatttggaaaacaccagacttactgaaaattgcaaggctgt |
| | | cctacactggttcactgggagtatctccgaggctcgacgagctgttgaacttggatgctatttctc |
| | | tattaatgaagagatgctacgttctcctaaacatcgaaagctggtgtcctttttgcctttcgaacg |
| | | tatcttgacggagaccgatggaccttttgtgtttcacgaagaaaaagcgatacaccctcgtgatgt |
| | | gcagcgtacggttcatgaaatcgcgcagatccaccacgtatcggacacagatgctgctatgagaat |
| | | actttataatcttcgaagtttagtcaccaatagttctcacagtgagaatagttcatgaatctaatt |
| | | agttggattaatacaggggaatagttgaatacttcagtcccctaaaagctaatatgctctatgtca |
| | | tctaatgataagtggctccaaagagccacttatcattaacttttctaaagggaggtagaagt |
| | | (SEQ ID NO: 294) |
| 52 | 23 | cggattgaatctgtttatgaaatttggctgctatcaactaatgggcgttaagttgattgtatgatc |
| | | tgattgataaagaaggggagactaaaaatctcctcttctttgcagcagtttactgcggtctttttg |
| | | tgatgcatcagcataaaacgttttacttgtggaccctaagaaatggagaacattatgtcgactgta |
| | | gatacctctacagcagaggaactcaatcaaggaggctcagattttattctgacttccctcgaggct |
| | | atgcgtaagaagttattggaccttacgtctcgaaatcgacttttgaatttccctatcactcaaaaa |
| | | gggtcttcactacgtattgttgatgaattaccagaacagctttatgaaaccctttgctcggaaatc |
| | | ccgatggaatttgctcctgtgcccgatccaactagagcgcagctgttagagcatggctatctcaaa |
| | | gttgggccagatggtaaagatatacagttaagagctcatcctagcgctaaggattgggcgcacgtc |
| | | ttaggaatccgtacagattttgatttaccagatagccataaaacggttgtttctgattcagataga |
| | | gagttgctggaaaaagcccatcagtttatcttgcaatatgcccaaggccagaatggaaaattaaca |
| | | gggattcgttctgaatacgttaatcaaggtatagctttgtcagcgttgaaggaggcgtgctgctta |
| | | gcaggctatgaagggcttgaggattttgaacgacaggcaaaggctgggaatgagattagtatatct |
| | | tcttccaatccctctcatgacgataatcggatacaggctctgctttatccaaatgaactggaagct |
| | | tgtttgcgcgccatctatggtaaggctcaaactgctttggaggagagtggcgccaacatcttgtat |
| | | ttggcgttagggttccttgagtggtatgaaagcgattcctctgaaaaggcacgttatgcaccgtta |
| | | tttacaattccggtgagatgtgaacgaggaaaattagatccgaaggatggtctttacaagtttcaa |
| | | ctttattacacgggtgaagatattttgcccaatctctctttgaaggaaaaacttcaggctgacttt |
| | | ggcctcgctcttcctttgttcaatgaagaggaaactccagagtcttattttgcttcggtgaagaag |
| | | gttgtagagcagcacaaacctaaatggtctgtgaaacgttatggtgcacttagcttgctcaatttt |
| | | ggcaagatgatgatgtatcttgacctcgatcctgcccgctggccttgtgacaagcgcaatatattg |
| | | tctcatgaagtaattcgtcgctttttcaccagtcagagctgtggtcaagagaattccggcttacct |
| | | ggtggcttcggtcagcatgagtactgcatcgatagttaccctgatattcatgacaaggttccacta |
| | | atcgatgatgcggatagctcgcagcacagtgcgttgatcgatgctatccgtggtcaaaacttagtc |
| | | attgagggccctcctggtagtggcaaatcacaaacgatcaccaacttgattgcagcagctctgctc |
| | | aacggtaagaaagtcctgtttgtggcagagaagatggctgcactggaggttgtcaaacgtcgcttg |
| | | gatcgtgcggggctaggtcaattttgcttagagttgcacagtcataaaactcataagcgcaaggtg |
| | | ctggatgatattaatgctcgcttggtgagtcaggcgaccatgcctactatggaagagattgatgct |
| | | cagattttgcgttatgaagatcttaagcagcagctcaatgaatatgccgcattgatcaataaccaa |
| | | tgggcgcaaacaggcaaaacgatccatcagattttgagtggtgcaacccgttatcgtcacaaatta |
| | | gatattgatgcaacagcacttcatatcgaaaacctttccgggaagcagttggataaagtgacccaa |
| | | ttacggctgcgtgaccaaatagtagaatttagccgcatctacaaagaggttcgtgagcaggtgggg |
| | | gctaatgcagaaatatatgagcacccttggagcggtgtgaataacacacaaattcaattgtttgac |
| | | agcgctcgtatagtcgatttgctacaaacttggcagacatcaattatcgactttcaacatagctat |
| | | caagaatatgtagataagtgggcgttagaaggcgaaagccttaatacgcttcaatatattgagcaa |
| | | ttggtagaagatcagtcgaatcttccagtgttgtgtggttcagagcatttcccagcacttagtgag |
| | | ctagattcacccgatgccattgcacgggtgcgtcactatttagataggttcgagttgctacaaggt |
| | | cattatgtggccttgagccaggttatcgagcctcaaaagctacgacttttagaacaaggacaatcg |
| | | tgtgactttcctcgtgaagagctggaaaaatatggtgcagcagaggatttcactttacgtgatttg |
| | | gtcaggtggcttgaatccatccaatcaattcatgatgagttatcatctatttatgcgcaattaaac |
| | | gatttcaaaaatgctttgccagatggtattgcttcgtatatcgatgattcgcaagctggattgcta |
| | | ttctgctctgagttgttgtcgattctgggtgctttaccgactgagcttattagagttcgagatcct |
| | | ctttttgatgatgatgatatcgatgcagtattgcgcgacttaatgtgtcaaatcgaaacattgcgt |
| | | cctttaagagatggtctatctactttgtatcaattggaccagttgccttcccaagagatgctcgcg |
| | | catgccgttgctgttatccagcaagggggattatttgcatggtttaagagtgattggcgtagtgcc |
| | | aaggcactgctcatggcgcaatctcgaaagcctgacactaagtttgctgagttaaaacgctgctca |
| | | gctgatttgctcaagtattcggagctgttacaacggtttgaacaaagtgactttggtaatcaactt |
| | | ggtaatgcattccgagggttggacaccgactgtgaacaactcatgttattgcgtgattggtacaag |
| | | aaggtccgagcttgttacgggataggttttggaaagcgagttgcgataggctctggattatttaac |
| | | ctagatggtgagattatcaaaggtgtgcatttaatcgagaaatcgcagattagctcaagattaatg |
| | | actttggttaaacgggtcgagcacgaggctaagttattaccgcgtatttctagcttgttggaagaa |
| | | catgcatcttggttaggtgagcaaggtgtattgatgcaatcttaccgacaggtgcggaatactctc |
| | | attgccttgcagggatggtttatcaatccagatatatcattagagcagatgactcattcctccgag |
| | | attttgcaaaacataaacgatcttcagatatcccttgaaaatgactcgttacagttaggggcgttt |
| | | ttacaattaaccccattggcttgcggtgcgtataaaaataatcaactgacgttagacactattaac |
| | | gacacgctgaattttgccgagcaactggttgataagataaattgcgtatccttggctacccagatc |
| | | agacatttggctagtggtagtgattacgatttactatgtcgtgatggtggagaaatagtttcgaaa |
| | | tggaatgaacagattaaaaatgctgagttatatgcgctagaaacaaagttagagcggagtcagtgg |
| | | ctcaagtcgactgatggttctcttaatacattaatcgagcgcaacgaaagagcaatacagcaaccc |
| | | cgttggttgaacgggtgggttaactttattcgttgttacgagcagatgcatgaaaatggattgcag |
| | | cgaatctggagtgctgtacttgcgggctcgctcccgattgaaaaagttgaattgggtttagcatta |
| | | gcaattcatgaccagctggcgcgggaggttattcacatccaccctgaattgatgagagtttccggc |
| | | tcacagcgcaatgctttgcagaagtcatttaaagagtacgacaaaaaactgattgaattacaacgt |
| | | cagcggattgcagcaaaaattgcttgccgaaatataccagaagggaattctggtggtaagaaaagt |
| | | gaatatacagaactagctttgatcaaaaatgagttgggtaaaaaaaccagacatattccaattagg |
| | | caattggttaaccgtgcatgtaatgcgctggttgcaattaaaccttgtttcatgatggggccaatg |
| | | tcagcagctcattacctagaacctggacgaatggaatttgatctggtggtgatggacgaagcgtct |
| | | caggtgaagccagaggatgcattgggtgtcatcgcgaggggcaagcaactagtggtcgttggtgac |
| | | ccgaaacagctaccaccaaccagtttctttgatcgaagtgccgacggagaagatgacgatgatgcc |
| | | gcggctttaagtgatactgacagcattttggatgctgctttgccactgtttcctatgagacgtttg |
| | | cgttggcactatcgttcacgacatgaaaagttgattgcatactctaaccgccatttttataacagt |
| | | gatttggtgatattcccttccccaaatgctgagtctccagagtatgggattaaatttacctatgtg |
| | | tcaaaaggtcggttctccaatcaacacaatattgaagaagcccaagcagttgctgaggccgtactt |
| | | catcatgcgcatcaccggccgggtgagtcactcggggtagtggccatgagttccaagcaacgcgat |
| | | caaattgagcgcgctatcgatgaattgcgccgaaatcgccctgaatttaacgatgcaatcgatggc |
| | | ttacatgccatggaagagccactttttgtgaaaaaccttgagaacgttcaaggggatgagcgtgat |
| | | gtaatctttatttcctttacctatggaccttctgagcatggtggaaaggtttatcaacgctttgga |
| | | cctatcaattccgatgttggctggcgtcgcttgaatgtgcttttcactcgatcaaaaaaacggatg |
| | | catgtgtttagttcaatgcgttctgaagatgtattgacgagtgaaaccagtaaacttggtgttatt |
| | | tcgttgaaaggttttttacagtttgccgaaagtggcaaactagattccctcacaacgcataccggc |
| | | agggctccagatagtgactttgaggttgctgtaatggaagcactcaatcacgctgggtttgagtgt |
| | | gaacctcaggtaggggttgcaggattctttattgatctagctgtgaaagatccaggttgtcctggc |
| | | cgttatttaatgggcatagagtgtgatggtgcggcttatcactcagctaaatctgctcgtgatcgt |
| | | gaccgtttgcgtcaagaggttctggagcgtttgggttggagaattagccgcatttggtccactgat |
| | | tggttcagtaatcctgatgaggttctatctccgattatccgtaaactccatgagcttaaaacattg |
| | | gctccagacgttgttgtaccttcctatgaatatgtcgaaacgattgagtcaagcgctgaagtggcg |
| | | tctgactcaattgattctcttatgcccaatttggggcttaaggagcaacttaagtattttgccaca |
| | | catgtcattgaggttgagcttcctaatgttgatgctgatcgtcgtttgttgcggcccgcaatgctt |
| | | gaggctttgctggaacatcagcctttatcacgttccgagtttgttgaacgaatacctcattatctg |
| | | cggcaagcaacagatgtatacgaagcacaacgctttcttgaccgagtcttggcattaattgatggc |
| | | gcagaggctgaagcgaatgatgcagcgtttgagtctgaattggcataattagttaaaggtaataag |
| | | aacagtgacaactgtcgg(SEQ ID NO: 295) |
| 53 | 24 | atgatgaagatcacctaaaatgataggttgtttttatacagtaccaaattcaattttctctctata |
| 54 | | agatagattgcatttccgcggatgtagtttacaagggaaagacggtcaacatgcatcgcactattt |
| 55 | | ctgagttttatcgcattccccctttacttattcgggcgctaaaaagtggaatttcctccgtggtgg |
| 56 | | agtttcatctcaacaggggattacccaaagattcacgagattctctgggaaacagcccattgatga |
| 57 | | ttgcggcccagtatggacatttcgctatttgcgaaatgttgttgagtgcgggtgttgatgttgaac |
| | | atcaaaacaacctcgggcttcgcgctagtgaccttgcgcaggagcaaaaattgcgtgatctgttgg |
| | | cccgttatcgtcagcctctttcacttgccgaactggaacgctctgtggtttcagtcgaggactcag |
| | | aaacagaggcagaattacccagcgctgaaatcccgatggattttatgctgtgggatgcagaagttg |
| | | aattgaagcccgccgaagataatctgacgttaagacatgcttccgctgaagcccagcaattattat |
| | | cacgctatcgcccgaaagataactctgctgagtggagcgatatcgaactcacgctccctgaaccac |
| | | tgacgccagtttctcactctccgcaaaattaccctcatctctcaacgttgctcattggcgcactgg |
| | | atacggggcgtatctctttgcgtgacatctggcatgccggggaagaggatttcggtatgcagtggc |
| | | ctgaattccggctcagcgtagaggcattgatcagggacttaccgctgattgtggatgacgatgata |
| | | ttattccgcctgacgctgctccggcgacattatcggtgagtgaacctcttgaaccctggtttgatg |
| | | ctttcaatgcattgcggcagttcggcatcgttgaaaactatctcgtggatatccgccagtgggatg |
| | | tcgtggataaaacaaaagaagaacgactcggccagcgcatggatacggcgctaattaatctgataa |
| | | gaatcctggcgggtttatccgaagcggaatatatgcagttgctgcagcccaattaccttccggagc |
| | | cagcgcctgagatttctgaagaggaagacgtcgcagaagaagcggatgaggaaatgcctcccgtat |
| | | ccgatgacgatgacgataacgatgacactatcagctttatcgagcttcttgttctgctgagaagtg |
| | | ggaaagcaggcgagtatcaggataatcatatcccccgcccggagtatgccgacctgcaacagatag |
| | | ttgagcgcgcccgaacgcttatccctgatgaaggtcataaaataagtctgtatgtcagcagttaca |
| | | gagaggcttgggaggggctgatccacgccaacttgcgtctggtcgtcaccatcgcgaataaatatc |
| | | gcgggcggggattagatgtcgaggacctgatccaggaaggtaatctgggtttgatcaaggccgttg |
| | | aaaaattcgactatcgacgcggatttaaattctccacgtatgccacctggtggatccgccagaaga |
| | | tcagccgcgcgattgccgatcaggcgcagctcatccgtttacccgttcacttctatgagcaattca |
| | | ggcgctggcgaaacagtcgggatcaattgctgtatcgccaggggataacgcccacgatcaaacggc |
| | | tgcaagcattgactgaccttccagaaaatcaactcaagcggatggcaaaatatgaagaacagacgg |
| | | tgttgattggcgattttcatgatgacgcccaggacagcgaagcggcgctgtcgggagacgcgatcc |
| | | tgaccggaaaggatttcaccagtgctcccgttcagtctctcgagctaagagaatgtgtttcattgg |
| | | tgctggaaacgttgttgccacgcgaaaaacagatcataaaaatgcgttttggcatcggtatgacgc |
| | | aagatttcacgctggaagaggtgggtaaacagtttgatgtcacgcgagaaaggatacgtcagatag |
| | | aagccaaagcgctccgtaagctccgctatcacagccgggcgtcgaaattaggcggcttcgtcgaac |
| | | agtgggaaaccgcgttgagcgagatgcaggaagaagaagaatgacgaccatgcgccatgcgccacc |
| | | gaatgcagccattatgatcgaagcgctgcgagggctcggttacaacactgccaccgcactggctga |
| | | catcatcgacaacagcattagtgccggtgcccgtaaggtcgatctgacctttcactggcgtgagtc |
| | | ggatagctatatcgtggttcgggataatggttgcggcatgtcggccgctgaactggatgttgcgat |
| | | gcggctgggggtcaaaaacccgctgacaaagcgttcaggacacgatctgggccgcttcggtctggg |
| | | actcaaaaccgcctccttttcgcaatgtcgccgtctgacggtcgcctccaaaaaagaggagataac |
| | | gaccatcctgcggtgggatctggacattctcgccgccagtacggacgacggttggtatttgcttga |
| | | aggcgctgacccaggaagtcaggaggcgttagcaaatgaggaacctgactcccacggtacggtggt |
| | | gctgtgggacgttttagaccgaattgtcacccccggctacggtgagaaagatttcctcaatctgat |
| | | ggatggcgttgaacaacatctggcgatggtatttcaccgattccttgaggggaacgctccccgact |
| | | cactctcaccctcaatggtcgcaaaattaaagcttgggatccctttctcagcgggcatccttccaa |
| | | gccctggcattcgccttcggcaatggcgccaggcgctcctgccgtgaaggtggagtgtcatgttct |
| | | gccgcatcaggatcacctgacgacgcaggagtatcaacaggctcaaggaccggcaggctggacggc |
| | | ccagcaaggattttatgtataccggaatgagcgattgctggtggcgggcaactggcttggactcgg |
| | | aagcccccgggcctggacgaaagatgaaacccaccgccttgcgcgaatccgtctggatatccctaa |
| | | tgatgccgacatagactggaagattgatattcgtaagtcgatggcccgcccaccggtttcgctgcg |
| | | gccttggttaacccaactggcgcaatcaacgcgtgatcgtgcggtacggacatttgcaaaacgcgg |
| | | gaaaatgaataagcgcaagcccggcgaggaacttgttcagctctggcaagcgcagaagacgccatc |
| | | cggtgttcgttatcagatttcgttacaacatcctgttatcagcaatgtcctttcgcaggccggtga |
| | | gttatctccacaaattcaggccatgctaagactgattgaggaaaccgttccagttcagcaaatctg |
| | | gcttgatacggctgagacaaaagagacgccgcggacaggttttgaaactgcaccgcccgcagaggt |
| | | gttgtccgtattgcaggtgatgtaccagactatggttggacagcaggcgatgtcaccggcgctggc |
| | | gaaacagcacctgcaaaatatggaacccttcgataattatcccgaattaattgcactactccccga |
| | | cgatcaacatgagaaatcgctatgagtcttaatcccttggatgacacgcaactgagtgtattgcag |
| | | attgtgcaaacgttcctgcaaagtcaggataaaagcacgatcacgcccggtattctgcgccaacat |
| | | attgatatggtttgtcagatgaaacctgagtggagccgccttgatagtcgggagatcctggtcgaa |
| | | gagttgatccgccgttacagcatctggatgggagaagattcttctctgagtaatgacgaagggcat |
| | | caaccctggctgaccgctgatgcgaaacgcgagtggcgctactggcatcgatatcgccagtggctt |
| | | ggcaaaacgatgccttggggagtcctggatacccttgaccgttcaacggatcgtgttctgggatta |
| | | cttgagcaaccggggcgggaagggcgttgggaccgacgtgggctggtggtcggccatgttcagtcg |
| | | gggaagaccagccactataccggtctaatctgtaaagccgcggatgcgggatataagataatcatt |
| | | gtgctcgctggtttgcataacaacctccgctcgcagacccaaatgcgtcttgatgaaggatttctt |
| | | ggttacgagacgagcccactcagagaaaaagtgaccatcattggggtgggcgctattgatagcgat |
| | | cctgtcattcgtcccaactacgtcactaaccgatctgaaaagggcgacttcagcgccggagtggct |
| | | aagaatctggggatcagccccgagcaacggccctggctgttcgtagtaaagaaaaataagtctatt |
| | | ttgaagcgcctgcatacctggattgagaaccatgttgccaccagcgttgaccccatcaccggaaag |
| | | cgttttgtttcggaattaccgctgctgatgattgatgatgaagcggataacgcctcagttgatact |
| | | ggggaaatcgtctacgatgacgatggaaaaccggatgctgaacatcagccaacggcaataaatagt |
| | | ctgattcgtaagctgttgatgcagtttagccgtaaggcgtatgtcggatataccgctacgcccttt |
| | | gccaatatttttattcacgagagcaatgaaacacgtgacgaaggtccggatttgttcccttccgcc |
| | | tttatcattaatctcggcgcaccctctaactacatcggccctgcgagggtatttgggcgggccacc |
| | | gcggaaggccggagcggagagtttcctttgattaggcgagtgagtgatcactgtagcgatgacgga |
| | | aaaagggggtggatgccggtttctcataagagttcgcactatcccacactggatacgctaactcat |
| | | ttcccggactcgttaaaacacgctatcgacagttttttactagcatgctgtgtcagagaattacgc |
| | | ggtcagggagagaaacacagttcgatgctggtccatgtgactcgcttcaataaggtgcaatcggtt |
| | | gtttatgaaaatattgatgcctacattcaggacgtgaggcagcgactgacgcgaaggattggacac |
| | | gaaccttttttacatcagcttgagtcactctggcaggccgattttttgccgacgaatcaggcgatc |
| | | cgcgaagttatgccgcagcaggttccggacgacgccttcgaatggcaggagatcgtcgacaagctg |
| | | tataccgtgatagaaaacgtgtcggtacgaatgataaacggaacggcgaaggatgcgcttgattat |
| | | tcggacagtgcgacaggcttaaaagtcattgcgattggcggagacaaactggctcgagggctaacg |
| | | cttgagggattatgcactagttattttttacgcgcctcccgcatgtatgacacgttaatgcagatg |
| | | gggcgttggtttggttatcgccagggatatctggatgtatgccggctttataccaccgatgagctg |
| | | attgaatggtttgagcacattgcggatgcgtcagaagagctgcgggaagagtttgacaatatggtc |
| | | gccagcggcggcaccccacgtgatttcgggctaaaagtgaaatcacaccctgtgttaatggtgacc |
| | | tcgcccttaaaaatgcgtagcgcgcgttcactatggctctctttcagcggcacagtggtcgaaacg |
| | | atttcgttgtttaaagaacaggagtatcacaagcgtaactacgtggctttccagcgtctaaccggg |
| | | cgcgtcggtgctggcgcgccgatacctgagagacgacgcggagataagattgaaaaatggaatggg |
| | | gtcatttggcaaaatatctcccctgagccgatcatcgatttcttaacggaatatgagacccatgct |
| | | caggccagaaaagctaacagcaaactactggcggattttgttacgcggatgaatcgcgttgatgaa |
| | | ctcacccaatggacggtggcggtgatagggggtggcatcgatcgccatcacgatgtttgcggcttt |
| | | tccgtaccgcttatgatgcgtaaagcgtctgaaggggtcactgaccgttattccattggccgttta |
| | | ctttccccacgcgatgaagggattgactgtgatgaatcaacttggcttgctgcgctggaagaaacg |
| | | cagcgtatttttcatgccgatcccggacgcaatgaagggcgagaggagcccgtcgttccaggtggc |
| | | gtggtactgcgtcggattaaaggatttggcattaacgacattccagcacagcgtcaaaaaggttta |
| | | ttgctcatttacttactggacccgcagcaggcattgtcggcagcggaatatcaggaagatgcctta |
| | | cctgtggtggcttttggcatcagttttccgggaagccgcagtggggtaacggtggagtacaaagtg |
| | | aacaacgtactatgggagcaagagtatggtgcggctgagtaaagacgatctgctggcggcctggaa |
| | | agccttagatcgatctcagatagacgaactgcctggcgctcagggctggcgcgggattcggctttt |
| | | tacgcaccagggctgtagctttcatgccgggcgtcgtcagcctgataatgaagaaatgctgattgc |
| | | cgtgtttcctcatcctctttcgcctgggtcggcggcgctgccatcttgtaaaggattccgcgttga |
| | | gatggccggaacagaggagggggggcagaacggtttgatgatccgtcgccagcaaacagggaatgt |
| | | ggatgtctttacgacgatgattctggatattctccattcgctcctgaacgtttcgaaaccgcgcct |
| | | gtttgaaactctgcttcgtcggattcgtttatggcaggcgtttatggagcgcgatacccgtccact |
| | | cagtcaagaagaagaagttgggttaatcggcgaattgacgtgtctggagcggttgatcgagagcgg |
| | | tcttgctccgtcaacggcagtcgaagcatggataggaccgcagcatgggctacaggattttgcact |
| | | cgatgaacgcgccattgagataaaaagcactacggcagcgaagggtttttgcataactatccactc |
| | | tcttgaacaactggactggcagcgggcaggatcgcttgtattgtgtggtttgcgcttcagcgagca |
| | | tcccaccggcgcaaccctgaatgacatcattagccgtcttcgtcaacggtttgagggaaacgctac |
| | | ggcggcttgtatttttgagggatcactttgtcatgtcggatatttcactgaacatgctgaattcta |
| | | tacacgtcatttcttgctgacagaggcgttcgcactccccattgaagcggattttccctctttgac |
| | | gcatgccaatgtcccgttgccggtggtgagtgcgcgctatcaactcgaactccagacacttattcc |
| | | tcaggcccaagattttaaccattgcttgtcagactttgcaggattaccgcatggaaattattgatt |
| | | ttttacgtcaaacccagaatgagattcgcaaggaatatcaggatcaaatggctcagccaggggttg |
| | | agtcgccttttccggagctgatttttaccgatattgttatgcgtcatatggccgatatcggcatga |
| | | cattcgatgatgccgagacgtgtcactttatggcgaaagtcagtggacacaatgtgcgtctcagcg |
| | | gttatgccttctcagaagatggcgatcaacttgacctttttgtcagtatttatcacggtagcgacg |
| | | agctctgtcacgtcccggatgctgagacaaaagcgattgccggccactgcattcaatttttgcaga |
| | | agtgcgttgacggtaaattatcatccacgctcgatcagtccaatgatgcctggcaactggtgacga |
| | | ccatcgaacagtcctatgcggaactggagcaaatcagaatttatgtactgaccgatggtcaggtga |
| | | aaacccgctggtatcagtcacgggacgtggccggtaaaaccattaaattagaggttatggacattg |
| | | tccgtttgtttaaccactggcaggaaggtaagccacgcgatgaactgcaggttaattttgatgagg |
| | | tggctgggggggcgcttccctgtgtctggatcccggatgaaatgggtgagtacgattatgcgctga |
| | | cggtggttccgggagagacactgcgatttatctatgaaaaatatggcaaccggattctggaagcga |
| | | acgttcgctcgtttctgagtcagacggggaaagtcaacaaggggattcgtgacactttacgtgagc |
| | | agcctgagcgttttatggcttataacaacggcattgtgattgttgccgatcaggtcaggcttggtg |
| | | aagcaccgggaggtggccctggtattgcgtggatgcaggggatgcagatcgtcaacggtgggcaga |
| | | cgacggcttccatgtttttcaccaaaaagaaatttccggcaaccaatctgcgtaacgtgcgtgtac |
| | | ccgcaaaagtaattgtgctgaaacagacgaataatgcacaagaagagatgttaattgcggatattt |
| | | cgcgcttctcaaatagccagaataaagtcaatatttccgatctgtcagccaatcgaccagtacatg |
| | | tacagctggaaaaaatggcaaacacggtgtattgcccggacggatacagtcgttggttttacgagc |
| | | gagcaaatggcagttataaggttatgctggaacgagaaggtaaaacaccggcgggcattaaacggt |
| | | taaaagacgcaattcctccatcccgtcggataacgaaaacggatttcgcaaaatatcactgtgcct |
| | | ggctccagcgtccggatttagtcagcctcggtgggcagaaaaactttgccgcattaatgacgatga |
| | | ttgacaaggatactgagcgttatggggatgaactgaacattgaaacttttaaaaattacattgcac |
| | | aggctattatttataaaaaagcctataagttgattaattcacttttccccgcatttaaggcgaata |
| | | tcgccgcctatactgttgccgcctattcacatctttatggtaacaaaacggatctggcagagatct |
| | | ggaatcaacagggtatcgaggaaactatggggaatcgtcttgtcagcttggctcaccgagtaaata |
| | | gccttctgactgaatcggcaaatggcaggatgatttctgaatgggcgaaaaagccggagtgctggg |
| | | actacgtgcgcagtaaaatctatttctccgcacagggaaaaaaggatgacttctcgcatggtgaaa |
| | | ttgcatgatgagttcagtatcaacatgatatgtgagtattactgacgtatggcagcggttgttttg |
| | | tatggatgtgctatggcatcgcatcaatatacaattaacagctg (SEQ ID NO: 296 |
| 58 | 25 | cgtgatgaatgaagcggctaaatacattaatgataattataatttaattcattaaaatcagtaata |
| 59 | | tataaatataaaagttgtgaaatgtgatattcgtcaaagcatgtcaaaaagttttgactgttcttt |
| 60 | | aggcatcattcgcaattgtctaacaacttgataggataggaacaatctcaaaaaggaaaatgacat |
| | | atggcatacgaagctcaaatcagccgtactaatccagcagcatttcttttcgtcgtcgatcagtca |
| | | ggttcaatgtccgacaaaatgtcttccggccgaagcaaggctgagtttgtcgccgatgctcttaat |
| | | cgaactttaatgaacctaatcactcgctgcactaagtctgaaggcgtacgtgattatttcgaaatt |
| | | ggtgttttgggttatggcggtcaaggggtttctaatggtttctctggttcactgggaggacaagtc |
| | | ctcaatccaatttctgctctcgaacagaatccagccagagtagaagatcgcaaacggaagatggat |
| | | gatggagctggcggaatcatcgagacagcaattaagtttccagtatggttcgatcctattgctagt |
| | | ggcggcacgcctatgcgtgaagccctgaccagagccgccgaagagttggtgacttggtgtgatgcc |
| | | catccggattgctatcctccgactatcctgcatgtgactgacggcgaatcaaacgacggtgacccg |
| | | gaagagattgccaatcatctacgacaaattcgcaccaatgacggtgaagttctgattcttaatatc |
| | | catgtcagttctctcggaaatgatccaatcagattcccctcctcagacactggcttaccggatgcc |
| | | tacgctaaactgcttttccgtatgtccagccctcttccggaacatctggtgcgtttcgcgcaggaa |
| | | aaaggtcatacggtcggtatagaatctcgtggattcatgttcaacgctgaggctgccgaactcgtc |
| | | gatttcttcgacatcggaacccgcgcttctcagttgcgttgattcagcaatgaaactggagttctt |
| | | agggacagttccgaaagatcctgaataccctaaggcgaatgaagataaatttgccttctccgaaga |
| | | tgggagaaggctggcgctatgtgatggcgcgagtgagtccttcaactcaaagttatgggccgatct |
| | | tcttgctcgtaaatttactgcagatccgaaagtaaatcctgaatgggtagcatctgctttagcgga |
| | | atattctgccacgcatgacttcccttctatgtcctggtcccagcaagcggcattcgaaagaggcag |
| | | ttttgcgacactaataggtgtagaggaatttgaagagcatcaggcggtagagattcttgctattgg |
| | | agatagcatcaccatgctggttgattgcgggaaactcatttgcgcatggcctttcgataatccaga |
| | | aaaatttaatgagcggccaacactgcttgctacgctgtacgctcataacaatttcgtcggtggaag |
| | | cactttctggacacggcatgggaaaactttttaccttgaaaaactcacccaacccaaactcctctg |
| | | tatgacagatgcgctcggcgaatgggcactgaaacaagcgctggcagaggattctggttttatcga |
| | | attactttcgctgcaaactgaagaagagcttgcagagttagttctgagagagcgtgcagcaaaacg |
| | | tatgcatatcgacgactcaacgctgcttgtactatcgttttaacgcggaaagtaaagatgccttac |
| | | ccatctcttgaacaatacaaccaagcgtttcagctacatagtaagctgctaatcgatcctgaattg |
| | | aaatctggtaccgttgccacgacagggttgggtctccccctagccatcagcggtggctttgcactg |
| | | acctatacaatcaaatcaggcgctaagaaatacgccgttcgttgctttcatagagagtcaaaagcc |
| | | ttagaacgccgttatgaggctatatccaggaagatttcaagccttcgctctccctactttctcgat |
| | | ttccagtttcagccccaaggggtcaaagtcgaaggaatatcataccctatcgtcaaaatggcatgg |
| | | gccaagggagagacgctaggagaattccttgaggtcaacaggcgttctgcacaagcaatagcgaaa |
| | | ctatctgcatcgattgaatcacttgccgcctaccttgaaaaagaaaaaattgcacatggtgatttc |
| | | cagactggaaacctgatggtctccgacggaggtgcaaccgtccagttaatcgactatgacggcatg |
| | | ttcgttgatgagattaagacattaggaagctcggagttggggcatgtcaattttcagcatccccgt |
| | | cgtaaagcaacgaatccgttcaatcacactctggatcgtttctcactaatttcactctggctggct |
| | | cttaaagccttgcaaatcgatccgtccatttgggataaatcaaattcggaactggatgcaatcatt |
| | | tttcgagctaatgactttgtagaccccggttcatcttccatcttagggatgctatcgggaattcaa |
| | | cagctttccacccatgtaaagaattttgccgcagtctgcgcttcagcgatggaaaaaacgccttcc |
| | | ctcggtgacttcattgcaagtaaaaacattcccatatcgctagcttcgatcagtatgaatggggat |
| | | attccagtcagcaggctgaaacccggttatatcggtgcctacaccgtcctgtcagccttggattac |
| | | agtgcttgccttcagcgagttggtgataaagttgaagttatcggaaagattattgacgtcaaactc |
| | | aataagacccgaaatggcaaaccatatatctttgttaatttcggagattggcgcggtaatatcttt |
| | | aaaatatcaatatggagtgaaggcattagcgctttaccttcaaaacccgatgcctcatggataggg |
| | | aaatggattagtgtaatcggccttatggaaccgccttacgttagcgggaaatacaaatattcacat |
| | | atctcaattacagtaacgactatcggtcaaatgaccgttctttcagaaccagatgcccgctggcgt |
| | | cttgctgggccaaacgaaagtcgacaaacattaacttctactagcagtaatcaggaagccttggag |
| | | cgcattaagagtaagagcaccacttcaactcctatgcccatgaacactaacgccacaactgcaaat |
| | | caggcaatccttaacaagttacgggcttctacgcaaactgtagcggcagcaagagcgcaaactcag |
| | | catgtagtacctaataaatcatcaacgcattatgtggcaccgacgggaacatcagcttcgcagcca |
| | | gttcaaaatattccgagccctgctagtacctcaaagcagcaaacctctcaaaaaaatatagttaca |
| | | aagattttgaaatggctttttggatgattggtacttgtaaagaacaagcgcaatttcagtggccgt |
| | | atcacttgcgcttgaggtgcctgcgggtatgatcttgcgacatacaccactaaaacgaattcgtgg |
| | | cggcacttttagcctgcccctgtgttttcccgaggatttac (SEQ ID NO: 297) |
| 61 | 26 | gggctgtttggttgaattaaaaatacgaactaaaaccaacaagagtcggaaaaaacttcaaaatgc |
| | | tgcttatggataatagtcatcttaaaaatgtacggaaaaagagactaaaatcagaaaaacatctgt |
| | | tatacattgacttaaagtcatcatctccgctatgagtcctcaatccaagttgacaaatgtttagcc |
| | | aggagttcccgtgaacgagcatctctctcatatggatgtacataccttgtttgaagaaatggacga |
| | | gcaggctgatggaataacgtttaaatactcatttgatgacatagcaaagagcaacgcattggttgt |
| | | cactgagtttgtcaattttgagcgtgacagcacggtagctttactcgccagccttcttactctccc |
| | | ggcacaccaatctcagtgtttgcgctttgagcttctgacgagccttgcactaattcactgcaaagg |
| | | tcagcagatagcaaatatcgatgacgtgaaacgctggtatgtcactattggggagtcgagtagtat |
| | | cgttggagaagatcctgctgaggacgtcttcgtcgcccttgttgataataaaaaaggtgattaccg |
| | | tgtgctagagggggtttgggaggcggcaggtttttatacacaattaatggtcgaaattgtatccga |
| | | catgccggatacgcaccgctatcgctcgctgaaacttgctatacaggcaattctccgtctctcaga |
| | | tgtcatttgtgctcgctctggcctttatcgttttcaggaaggcgcagacgaattccctgactctct |
| | | tgacaccgctggtcttgatgagaaaacgctctgttcaagggtaacgttgtccgagcgttctcttcg |
| | | agctgaggggatcaaacttgctgacttagcacctttcattcttgaaccttctcatataagtatgct |
| | | tggaaatcaggtccctggggagggaatgcttgaacaacggccattgctccgcacacgcgatggtat |
| | | tgtggttgtacttcctaccgccatgaccattgcacttcgccaggcagtgataacatttgcaaagcg |
| | | cacagaagaattgagcgagctagacaaagcgttagctaacgtctacagccttactttctccgagat |
| | | gccggtcttcggtaatggaggaaggttaagaagactgacatgggagaagtacaaaatgagccgaac |
| | | aacgatggtaacctccatcgtggatgctggtcatttgatggtacttcagttcgttttgccttccat |
| | | acagcaatatgccgataccggtttcaacaacttgctacagctagatgaagagaccacgcaatttct |
| | | agataactctgttgaacaaattacagttgacctcgccaaacaacccggctttcagcgtggcatcgt |
| | | cgtgcgcattgcatgtgggtggggggcgggttttatgggggtccctccccaactgccagatggttg |
| | | gggatttgaatggatgtctggtgcggactttgtccggttcggggcattacccgatatgtcaccaat |
| | | tgccttctggcgtgtgcaagacgcagtcgaaacgatcaggcaagctggtgttcgattaatcaatat |
| | | gagcggaactctcaatcttcttgggtggatacgtgccaatgatggccatatggttcctcatgacca |
| | | gttaccagatgaccgtatcacaccggaacacccgctaatgttaatgattcccacgaatttactccg |
| | | tggtatacgaatagcggcagacacaggatatgaccggcatcgcattagtgacaacaatggtaaatg |
| | | gcatcgagtgatgaggccttcggcagaagatttctttcccaccgagcgtcagagcaagtgctacgc |
| | | atcaattgatgatcttgaagcgcaacggctgacctgtgtatatgaggggcagggtaatctttgggt |
| | | aacgctcgaagctccagaaatggaagattggatgctcctcgttgagcttgccaaaatggttcgaac |
| | | atggattgggcggattggcgaggcactggaggtcttgagtgagcaaccaataaaaaaatcattaaa |
| | | ggtgtatctgcattttgatggtaacgacaatatcggcagatttgatggtgagaatttttctgatga |
| | | tatgaatacattttggcgacttgaacgaatccatgagcatggggcgattcgtgtggttcttcaaga |
| | | tgggtatcttgcaggttttcgtctaccggataaccgtgcagaacgagctctggtgcgcgcactcgg |
| | | tacggcgtttgccacacttcttcggatgaaagagccagtagacaaaggggtcactgttgagcagat |
| | | agcggtgcccaatgacagagcgcgcagcttccacataatgcaggcttatgacttcaaccaatattt |
| | | aggccgttcactaactaaacgtcttttagctattgaagatatcgactcagccgcagcccgaattga |
| | | gctagcatggcgtgctgtttcgacagatgcaccatcacgatatcagggtaaaaaggaagttggaaa |
| | | gctccttaatgatgtggttgatgtgctgatccaagacttactaagcgaactttcaagatttgaccg |
| | | taaacagacagtaatgcgattacttgaaaacgttgtaaaggcacgttgtgaagaggcgcactggcg |
| | | tagtactgcagcagcggtccttggcttgcatgcaggagaagagggtgtcgaagagacgatagctca |
| | | agaaatgagccgttatgcgggcgcagcgttaacttcccggctaatcattgaacttgccatctgtgt |
| | | gtgcccgacaagcggtggaattgaaccttctgatatggcactcagtaaacttcttgcacgggcatc |
| | | actgctttttcgcataggtggtatgtcagatgccgtacgtttcggtgctttgcctgctgatattcg |
| | | catctcccccttaggtgatctcctctttcgcgatgaactcggcaaaatggtgcttgaaccaatgct |
| | | ttcaaaagttactaacgaacggtttgaggaacaagcggcacaattcgagcaacactatgtgaaaac |
| | | tgccggaggggatgatgagaatagcaaacaagatagtgttgcggctgaaaccaccgaggaccaaac |
| | | cgatattttccttgcattctggaaagcagaaatgggcttcactctcgaggatggaatgcgatttat |
| | | ccagttccttgagtccatcggaatagagcaagaatcagcaatcttcgagatgcgaagaagccaatt |
| | | agcggatgctgctaaatcggctgggctcgcagatgaaactattgatgcgttcctcaaccagtttat |
| | | ccttagcgcgcgtccgaaatgggatgtagtgcccgatggatttgacctttctgatatatatccctg |
| | | gaggtttggccgacgcctttcagttgctgtacgtcccttgttacagattgaagagagtcacgatcc |
| | | actaattgttatcgcaccaggactcttgaatctgtcccttaaatacgttttcgatggcgcatacac |
| | | tgggcaatttaagcgtgacttctttcgcacagagggtatgagagacacttggttaggtggagcgcg |
| | | ggaaggacacacattcgaaaaaactttggagagagaacttcgtgaaataggctggacagttcgacg |
| | | tggcataggctttcctgaaattcttcgcaggaatctaccaggtgatccgggggatattgatcttct |
| | | tgcctggcgctcagaccgcaatcaagttctcgttatcgaatgtaaggacctctcacttgctcgtaa |
| | | ttactcagaagttgcctcgcaactatctgaatatcaaggtgatgacataaagggcaaaccagataa |
| | | actcaagaaacaccttaaacgcgtattactagccaaagaaaacatcgataattttgccaagttcac |
| | | ttcgatagcgaatcccgagattgtatcgtggctcgttttcagtggagcatctcccattgcctatgc |
| | | tcaatccaagattgaggctttggcaggaactaatgttggccgcccaagtgatcttctgaacttttg |
| | | atagatatgctgtgcgataagacgccctggcaactaagttaatcgttcctactactgatagtttta |
| | | aatcaagg (SEQ ID NO: 298) |
| 62 | 27 | gatggactggtactgtagattcaccgtggaccagcgaatctattatgtggtgagcagaacattaac |
| | | acatcaatgtaacgccgtaatcattgagtctttgccggggacgcttgacatctccgaaagaattat |
| | | atcgtgagtcttaaggggaatctcttgcttccggttatacatttaaccggatctagctataagact |
| | | gttacatctattgggattaggtcaggacagatagcctgaaagcttttatagtgagggacttcagaa |
| | | ataccctagaaaaggaactgttatggtaggttcgcgctggtataaatttgattttcataaccatac |
| | | tccggcttcgcatgattacaaaattcctgacatcagccccagagagtggcttctggcttatatgaa |
| | | acagcatgtcgattgtgttgtaatcagcgatcataacagcggagcctgggtcgacgtgttgaaggg |
| | | tgagctggagaatatgtcccgggacgccagcaccggcgacctgccggaatttcggccactgacact |
| | | ctttccgggggttgaactgacagcgaccggtaacgtacatattctggctgtgctgcacacgcacag |
| | | tacaagtgccgatgtggaaaggcttctggcccagtgcaataataatagccccattccgagtgaagt |
| | | ccctaaccatcagctcgttcttcaactgggccccgccggcatcatcagtaatatccgccgtaatcc |
| | | gaaggctgtttgtattcttgcgcacattgatgcagccaaaggtgtcttaagtctgactaatcaggc |
| | | agagctcaccgcagcctttcaggaaagtccccatgccgttgagattcgacaccgggtggaggatat |
| | | caccgacggaacccgccggcggctgattgataatttaccgtggctacggggctctgatgcgcacca |
| | | tcctgaacaagccggcgtgcgaacctgctggctgaaaatgtcatcccctgattttgacggactcag |
| | | gcatgcactgctcgatccggaaaactgtgtgctgtttgatcagctccctccggaggaacctgcgtc |
| | | atatttgcgcagcctgaaattcagaacccgccactgccatcctgtgggtcaggattcggcctcggt |
| | | ggaattcagcccgttctataacgctgtaatcggctcaagaggcagcgggaagtccacgctcattga |
| | | aagcattcgtcttgcaatgcgcaaaacagaaggtctcactgcgacccaggggagtaagctggacca |
| | | gttcattcggacggggatggaagcggattccttcatcgaatgtattttccacaaagaaggcacaga |
| | | tttccggctcagttggcgaccagacagtaagcatgaattacatatcttcagtgacggagaatggat |
| | | gcctgacagtcactggtcggctgaccgttttccactctcgatttacagccagaaaatgctctatga |
| | | gctggcttcggatactggtgcattcctgcgcgtctgtgatgagagcccggtggttaacaaacgggc |
| | | ctggaaagagcgctgggatcagctggaaagggaatatctgaatgaacaaatcacgttgcggggcct |
| | | gcgtgccagacagggaagtgcggattcgctgcggggggaattatcggatgctgaacgtgccgtcag |
| | | tcagctgcagtcaagcgcctattatccggtttgcagacagctggccctcgccagaaacgagctgtc |
| | | cgcagcaaccttacccctggagcactttgagcggcgtattgcagccattcaggctctggcagaaga |
| | | accgctgcagagatccgatatcccgccggaaccttccggtctgctgatggcatttatggcgcgcct |
| | | gtcatctgtgcaacagcagtatgaccagcggctcaatactctcctggcagaatatgctgcagagct |
| | | cgcgggtatcaggagagagcaatcttttattgccctccgaacagcagtgagtgaccaggaaacaaa |
| | | tgtagaaagtgaagctgtttccctgcgggccagagggcttaatcccgatgttctcaacgaactgat |
| | | ggcacgctgtgagtcactgaaaaatgagctgagaaattacgacggtcttgatggggcgatctctgc |
| | | ctctgttgcacggtctgagcagttgctggctgaaatgcgtgcccacagaatggcattgacagataa |
| | | ccggaaggcgtttctctcctccctgtcgctcagcgctctggaaatcaaaattcttcccctctgcgc |
| | | cccttatgaagatgttatatctggttaccagacggttaccggcatcagtaattttgccgaacgtat |
| | | ctacgataacagtgacgggagcggattactgagcgactttatcagtgaacgtccgttcagcccgtt |
| | | gcctgccgcaacagagaaaaaatacagggcgctggacgagctgaaagcgctgcatcacagcatccg |
| | | gctggataattcagaggctggggcggggcttcatggttctttccggaatcgtctcaggagtctgaa |
| | | tgaccagcagctggatgccctgcaatgctggtatcctgatgacggcatccacatacgttaccagac |
| | | ccccggggggcagatggaagacattgcctttgcttctccggggcaaaagggagcgagtatgctgca |
| | | gttcctcttatcctatggcaccgatcctctactactggatcaaccggaggatgacctggactgcct |
| | | gatgctgagcatgagcgtgatccctgccatcatgtcgaacaagaaacgccggcagctgattatcgt |
| | | gtcgcactctgcccctatagtggttaacggcgatgcagaatatgttatcagtatgcagcacgatcg |
| | | cacaggcctgtatccaggactctgcggtgcactgcaggaagctccgatgaaggcactgatatgccg |
| | | tcaaatggaggggggagaaaaagcgtttcgttcgcgctatgagcgtattcttagctgaagaacgga |
| | | accgtccttaaggcggccatgaccggagagtgggcctggcggctgaatgcctggataaaagacgca |
| | | aatgtcagactgatggcctctgcgtctttg (SEQ ID NO: 299) |
| 63 | 28 | atagaacgatgaaggatggaagctacatattctcggtactaagatttatttttctgacacaaaatg |
| 64 | | accatttggcgttacataatcccaaaaaaacgtatcaaaaatctcaaaatgcgttacgattagaga |
| | | gtattttgattctgcgtgctcattttttgattgctgtggctttttgttgtgggagtgttgaatgga |
| | | ttatttatcagaagtgttaaaaatcattgaaggtgcaacaaaggcaaatgcttcgatggctagtaa |
| | | ttatgctgggttgctggcagataagctcgaacaaaaaggggaggtcaagcaagccagaatgataag |
| | | agaaaggttgcttagagctccccaggcgttggcaggagctcaaagggctggaggtgggatatctct |
| | | gggctcattaccggtagatattgatagtcgactcaacactgttgatgtcagttatcctaaattaga |
| | | cagttcagagatttttctgcctgcagcaatcagtacccgtgttgaagagtttatcactaatgttca |
| | | acgttatgatgagtttgttaaagctgatgcagcattgccgagtcgtatgctcgtgtatggaaagcc |
| | | aggaacaggtaagactatgttatctaagtacatcgctacccgcttagattttccacttcttacagt |
| | | gcgttgcgatactttgattagtagtttattgggacaaaccagcaaaaatcttagacaggttttcga |
| | | ttatgtaatgcagaggccatcagtgctttttttagacgaatttgatgctttagctggagcaagagg |
| | | taatgagagagatataggtgagcttcagcgagttgtcatttcactattgcagaatatggatgcggc |
| | | atcagaggatacggtaattattgcctcaactaaccatgagcaacttctggatcctgcaatctggag |
| | | gcgatttagcttcagaattccaatgcctctgcctgacatacatcagagagagttaatttggaaaaa |
| | | tcgtttaaagaatatgatatgtagcgatctagatttaagtgatttatcaagaaaatcggaaggatt |
| | | atccggagcaataattgaacaggtgagcttggatgcacgtagggatgcagttattgaaggtgcaag |
| | | tgtgataaatcaccataaattgtataggcgtttgtatcttgctcaatcgcttatggaaggtgtaaa |
| | | tttaagcacttacgaagatgaaattcgttggttacgttctaaagataaaaaattattttctatcag |
| | | agttcttgctaatttgtacaaacttacatcaagagtaatttcaaacattctgaaggagtcaggagc |
| | | atatgagcagaaggggtacacagtttagtaacgcaaaagttacaaacccaatgttaagaatccctt |
| | | tttccagtagtgacttgggtgcaatagtaaacgctggcggtggggcaaaggtattggttgatgtaa |
| | | cagccgaatatagacaagggctagtaagaaatttaacaaccagtaaacattatttagaatccaaac |
| | | tttcagagtaccctggaagcttgggtactttggttttcaaattaagagaccagggaatagccaaaa |
| | | cgcataggccgaacaaaattgctcaagaggctggattgcaaaatgccggtcatgccaaaatagatg |
| | | aaatgttggttgctgctcatgccggctgttttgacgtattagagtcagtcattttacatcggaata |
| | | ttaaagcgattttggctaatctaagcgcgattgagcgcattgaaccttgggatgagaataggaagg |
| | | ttccaggaggcactgatggtttgtttgaatcatcaaacatccttgtacgactatttgagtacacag |
| | | gtgaagatgcaacttacaacaactatgaaaacgttatttctatattagaacaacacggagttaaat |
| | | atgatgagattagacaaaaatgtggtcttcccttattaaggataatggatttatccccaaatgata |
| | | gatatatattagacattctcattgattacccgggtataagaacgttaattcctgaaccaaaatatt |
| | | cagcattcccggttagtgtaagtgattctgttggcattgaaacaaatagctttcccgtaccatcag |
| | | aagaattacccattgttgctgtatttgacactggggtaagccccatcgcggcaacaattactcctt |
| | | gggtagtgagtagggaaacatacgtaattcctcctgatacgagttatgaacatgggactatggtgt |
| | | cttcattgatatcaggcgctcattttttaaatgacaatcatccatggattcctgatacaaaatcta |
| | | aaatccatgatgtttgtgccttagatgaaaatggatcttatatatcagatttaattctgaggctag |
| | | cagatgctgtaaataaaagaccagatataaaagtctggaatttgtctttgggaggcggaccatgta |
| | | atgagcagacgtttagtgattttgcgatggagttagatcggctcagcgataaatttggtattttgt |
| | | ttgtagttgctgcaggtaattatgtagatgaacctatacgtacatggccaaatcctgatccgcttg |
| | | gaggtgctgatttaatttcctctcctggagagtcagtccgagcactaacagttggttcagtttctc |
| | | atatggaagctaatgatgctttaagtgaaattggaacaccgacaccatatactcgtcgtggccctg |
| | | ggcctgtatttactccaaagccagatataatccatgctggcggtggggttcatagaccttggaatg |
| | | taggagcaagcagtttaaaggtcgtagggccagataataggctttgctctaattttggtactagtt |
| | | ttgctgctccaattgtggcaagtttagctgcgcatacatggcagagaatagccactaatacagact |
| | | ttaatgtttcaccatcattgattaaagcattattaattcattccgctcaattatcttctcctgatt |
| | | actcgccaagtgaaagacgctatttgggagcgggaattcctaatgaagttattgagaccttatatg |
| | | atagtgatgataggtttactctgattttccaaacattcttggttcctggggtgaggtggagaaagg |
| | | ataactatcccataccatcggcacttattcaaaatggaaaatttaaaggtgagattgtaattactg |
| | | ctgcatatgcaccaccactgaaccctaatgccggcagtgaatatgttcgcgcgaacgtagagctaa |
| | | gttttggcttaattgagaataatactataaaaggaaaagtgcctatggaaggagaaaacggtcaat |
| | | ctggatatgagagagctcaaattgagcatggtggaaagtggtcaccagtaaaaattcatcgcaagg |
| | | catttaataaaggaattacttcgggtaactgggctcttcaggctaaaacaacgttgagagcgaatg |
| | | aaccggccttaatggagcctttacctgtaactattgtagtaactttaaaatcattagatggaaaca |
| | | cacaagtttatgctgatggcgtaagagctttaaatgctaataactgggctcactatccattgcctg |
| | | ctcgtgtgccagtttccgtataacaactatataaatcaaacccgctgtagcgggtttgatttattt |
| | | gtgggtgtgttttataaaaataccgcccatacacaacaaaatacaa (SEQ ID NO: 300) |
| 65 | 29 | cgtgattcagttcgccagactgcagcgttttccatgaatataactccatctggtttagaaagagtt |
| 66 | | ccaatctaacgatattgggaccagaatcacaggcggcagtggctttacgcttacaataactattct |
| 67 | | atcctgacaattttaagcctcgtttgttacgatgtaaccctataactatgtggttcctcaaccttt |
| 68 | | tttgcccaaaaaatgcccaatgaagtccaaagtggaaaacagatggttatccgttgatgagattgc |
| | | agattacctcgcgattaagcgagacacggtatacaagtagatcgcaaagaaaggtatacctgcaca |
| | | catgattggacgcctttggaaatttaaaaaggatgaagtagatggctggatacgcgatggcaaagc |
| | | tggcgaaaacagtaatcaagaataaaaaagcaaatttaggagcagtttaatgaaaaccgtacgtag |
| | | tgcatgccagttgcaaccgaaggccttggaaatcaatgtcggcgaccagattgaacagcttgatca |
| | | aatcatcaacgacaccaatggccaagagtactttaaaaagaccttcatcactgacggttttaaaac |
| | | tttgctctccaagggtatggcacgcttagccggtaaatcaaacgatactgttttccacctgaagca |
| | | agctatgggtggtggtaaaacccacttgatggtcggctttggtttattagcaaaagatgctgccct |
| | | tcgaaatagccacttaggatcaatgccataccaatcagattttggctcagccaaaatagcagcatt |
| | | caatggacgcaataatcctcattcctatttctggggtgagatcgctcggcagctaggtcgagaggg |
| | | tgtattcagggagtactgggaatccggagccaaagctcccgatgaacaagcatggataaatatttt |
| | | tgatggtgaggaacccatcctaatcttgttggatgaaatgccaccatacttccactactacagcac |
| | | ccaagtccttgggcaaggaactatagctgatgtagtgacacgggctttttccaatatgttgaccgc |
| | | agcgcagaagaaaaagaatgtatgtattgtagtttccgatcttgaggcagcttacgatacaggagg |
| | | caaactgattcagcgtgcattggatgatgctacgcaagaactcggacgcgccgaggtatccattac |
| | | gccggtaaacctcgaatccaatgaaatctacgagattctgcgtaaacgtttgtttttgtctctgcc |
| | | agacaaaaatgaggtctctgaaattgcgtcgatctatgcatcaagacttgcggaagccgctaaagc |
| | | caaaaccgtagagcgcagtgcagaagcattggcaaatgacatcgaatctacttacccattccaccc |
| | | aagctttaaaagcatcgttgctttgttcaaagaaaacgaaaagttcaaacaaacccgtggtttgat |
| | | ggagttggtttctagactgcttaaatcggtgtgggaaagcgatgaagaggtgtatttgatcggtgc |
| | | ccaacactttgatctttcgatacacgatgttcgtgagaagctggctgaaatttcagaaatgcgcga |
| | | tgttatcgcaagagatctttgggactccaccgacagcgctcatgctcagatcattgacctcaataa |
| | | cggcaaccactatgcacaacaggttggtacgctattgctaacagccagcctctccaccgcagtgaa |
| | | ctcagttaagggcttaaccgagagcgaaatgctggaatgtttgattgatcctaaccatcagggtag |
| | | tgactaccgaaacgcattcactgaacttgctaaatcagcttggtatttgcatcaaacacaagaagg |
| | | gcgcaattacttcagtcaccaagaaaatctcaccaaaaagcttcagggatatgccgacaaagcacc |
| | | tcaaaataaggttgatgaattaattcgtcaccgactagaggaaatgtatagaccagtcacgaaaga |
| | | agcatacgaaaaagtactaccactccctgaaatggatgaagcacaggccacactgaggagtggtcg |
| | | tgccctgttaataatcagcccagatggcaaaacaccacctggtgtagtcggcaacttctttaaggg |
| | | cttggtaaacaaaaacaacattctggtattaacgggcgataaatcctctattgccagtatagaaaa |
| | | ggctgcacgccatgtttatgctgttaccaaggcagacaacgaaattacagcatcacatccgcagcg |
| | | caaagagttggatgagaagaaagcacagtatgagcaggacttccaaactacagtgctctctgtatt |
| | | cgataagctcctgttccccggtaacaatcgaggtgaagacgttttacggcctaaagcgctggatag |
| | | cacctatccatccaacgaaccatacaacggtgaacgccaagtcgtgaagactctcacgtccgaccc |
| | | catcaagctttacacccagattaacgaaaatttcgacgcactgagagcccgagcagagtcattgct |
| | | gttcggtactttggatgaggcaagaaagacagatttgctcgataagatgaagcaaaaaacacagat |
| | | gccttggttgccaagccgtggcttcgatcaactcgctatcgaggcataccagcgaggtgtatggga |
| | | ggatttaggcaatggctatattacgaaaaagcccaagccaaaaaccactgaggtaatcatcagcga |
| | | ggactcatcaccggatgatgccggcaccgttcgtcttaaaatcggcgtggctaatgcaggtaacag |
| | | cccacgcattcattatgctgaagatgacgaagttaccgaaagcagcccagtacttagtgataacac |
| | | gctagcaaccaaagcattgcgagtgcagtttttggcagtagaccctaccggtaaaaaccttactgg |
| | | aaacccaaccacctggaaaaatcgactgacattacgcaatcgctttgacgaagtggcgagaacagt |
| | | cgaattgttcgttgccccccgtggcacaatcaagtacaccctagatggttcagaagcacgtaatgg |
| | | tgaaacctacaccgtgccaatccagctcgctgatcaggaagccactatctatgtctttgctgaatg |
| | | tgatggcttagaagagaagcgaaatttcacctttgcggcagcaggttctaaagaaataccgatcat |
| | | aaaagataagcccgccactctggtcagcccctcacccaaacgtatggatagctcggcaaaaaccta |
| | | cgagggtttgaaaatcgccaaagagaaaggcattgagttcgagcagattagcttaatggttggatc |
| | | tgcaccaaaggtgattcatatatcgctaggtgagatgaaaatcagcgccgaattcattgaaaccgt |
| | | attaacgcacttgcaaaccgtgttaagtccagaagcccctgtggtcatgaccttcaaaaaagccta |
| | | cacacagactgggcatgatcttgagcaatttgttaagcagcttggcattgaaatcggtaatggcga |
| | | ggtggaacaacgatgaataaaaccgttgattttggggcaccgtcagaattcggtatgcatcacttc |
| | | tatgtggagattcccgcagcgccccgtgacgctgttgtgatctatgaagactatggctttgacggt |
| | | gaagattctcgccgagaaacagtagagtgtcgcctgatattagccagagagctctggactaagatc |
| | | cgcgatgacgttcgccgtgactttaacgctcgcctaaagattaagaaacaaagctccggtacttgg |
| | | tctaccggtaaagtgaagcttgaccgctttcttggacgtgagttgtgcgttcttggctgggcagca |
| | | gaacatgcctcacccgatgaatgtctggttatttgccaaaagtggctggctttacgcccagaagaa |
| | | agatggtggctttacagtaaaaccgcagctgaagcaggtcgtgatgatcaaacacaacgaggctgg |
| | | cgtaaagcgctctattgcgcgctatcggatggagccaatatcaaattggaaaccaaaaagaagccc |
| | | aagtctaaaaagctacaagttgaagatgagacccaggatctgtttgggtttatggaaaagggagag |
| | | ttttgatggccttgcaaccgtttgaatggagagacaaaccgtctcttattgagcacctgttcccgg |
| | | tacaaaaaatatctgccgagacctttaaagaacgaatggcaagccacggtcagttgctggtgtcgt |
| | | tgggtgctttttggaaaggcagaaaacctctcatcttaaacaaagcgtgcattctgggctcattgt |
| | | taccagcaactgacaacccgcttgaagatttagaggtatttgagctgttaatgggcatcgactctg |
| | | agtcaatgcaaaagagaattgaggcttcactaccagcatcaaaacaagaaacaatcggcgattact |
| | | tggtattaccctatgccgaacaaatcaggattgctaagcgcccggaagaaattgatgaatctcttt |
| | | tcgtccatatttggaatcgggtcaacaatcatcttggtacttctgctcacacttttgcgcaactag |
| | | ttgaggaactaggtgttgcacggtttggccataggccaagagtggcagatgtattttctggttcgg |
| | | gtcaaattccgtttgaggctgctcgcttaggttgcgatgtctatgcctctgacttaaacccgatct |
| | | cctgcatgcttacttggggcgctttgaacgttgttggtgcgagcgcgcaaaaaagagtagaaatag |
| | | acaaagcccaacgggatatcgttaagaaagttcaaaaagagattgatgagcttgacattgagtccg |
| | | atggccgaggatggcgagcaaaggtattcctatactgcgttgaggtgacctgccctgaatccggtt |
| | | ggcgtgtgcctttaattccaagtttgattatcagcaatagttttcgagttgttgctgagcttaagc |
| | | ccgttcctgctgagaggcgatatgatattagtatccgtgaagtatcgactgatgaggaactggagt |
| | | tctataaatcaggcaccatacaagatggcgaggtaattcactcgccagatggaaaaactcagtatc |
| | | gcgttaatatcaaaacaattcgcggtgactataaagaaggcaaggagaacctaaacaagctgcgaa |
| | | tgtgggagaaaacagactttgctcctcgtcctgacgatatttttcaggatagattattttgcgttc |
| | | aatggatgaaaaaaaaacctaaaggatcgcagtattactacgaatttcgtactgtaaccaatgacg |
| | | acttaaaacgcgaaaaaaaggtaatagaacatgtcgcatccaaattagatgactggcagaagcaag |
| | | gtcttgttcctgatatggttattgaagcgggcgataaaacggatgagccaatcaggacgcgaggct |
| | | ggactcattggcaccatttattccatccaaggcagttgctatttttgagcttggtgaacaaatatt |
| | | cactcgcagaaggaaaatttaacttcttgcagtgcatgaatcacttgtccaagctaactcgctggc |
| | | gaccccaggccggtggtggtggcggttctgcggctacatttgataatcaggcgctcaatactctgt |
| | | acaactacccagttagagcaacaggatctatcgaaaatatcttggctgctcagcacaaccactgtg |
| | | gaatcagcgagaatgtttcctttgtggttaattcacatccagcgccagagttagatgtggaaaacg |
| | | acatttatattactgatcccccatatggcgatgctgtcaagtatgaagaaatcacagagttcttta |
| | | ttgcctggctgaggaaaaatccgccgaaggaatttgcccactggacttgggatagtcgccgatctc |
| | | ttgcggtaaaaggagaagatgagggtttccgtacaggcatggttgctgcttatcgcaagatggcgc |
| | | agaagatgccagacaatggtttacaggtgctaatgtttacccatcaaagtggcgctatctgggcag |
| | | acatggctaatatcatttgggcgagcggccttcaagttactgccgcatggtacgtagttactgaaa |
| | | ctgactctgcattacgtggtggttctaacgtaaaaggcaccatcatcctcattttacgcaagcgcc |
| | | atcaggcattagagaccttccgcgatgatttaggttgggaaatcgaagaagccgttaaagagcaag |
| | | tcgaatcgttaatcggattggataagaaggttcgttcccaaggcgcggaaggcctctacaccgacg |
| | | ctgacctgcaaatggctggttacgcagccgcgttgaaagtactgacagcttattcccgtatcgacg |
| | | gtaaagacatggtgactgaagccgaggcaccacgccaaaaaggcaaaaaaacttttgttgatgagt |
| | | taattgatttcgccgtgcaaacggcagttcagtttttggtgccggttggcttcgagaaaagcgaat |
| | | ggcagaagcttcaagcggttgaacgcttctatctgaaaatggccgaaatggaacaccagggtgcaa |
| | | aaaccttggataactatcagaacttcgccaaggcgttcaaggttcaccattttgatcaattgatga |
| | | gtgatgcctcaaaggctaactctgctcggctaaagctttctaccgagttcagaagtaccatgatgt |
| | | caggtgatgccgaaatgactggcactcctctgcgagcccttctttatgccttatttgagatatcga |
| | | aagaagttgaagtagacgatgttcttttgcatctcatggaaaactgcccgaattacctgcccaata |
| | | agcaactgcttgccaaaatggcggattacctggctgaaaagcgtgaaggtctaaaaggtaccaaaa |
| | | cgttcaaccctgagcaggaagcaagcagcgcgcgtgtccttgcggaagccattcgaaaccagaggt |
| | | tgtaatctatggcgattaagcgcttttcatcccgcacagaaagattagatacggaattcctcgctg |
| | | aatcgttgaaaggggctgctaagtatttccggattgcgggttatttcaggagctccatctttgagc |
| | | ttgtaggcgaagagattgcaaagattccagaagttaagatcatctgtaattccgagcttgatctgg |
| | | ctgacttccaggtagctactggccggaatacagcactcaaagagcgctggaatgaagtggatgtag |
| | | aagctgaagcgctactgaaaaaggagcgctaccagattttggatcagctattacattcgggtaatg |
| | | ttgagattcgcgtagtccctagggagcggttattccttcacggcaaagcaggctcaattcattatg |
| | | cagatggcagccgtaaatcttttattggctcagtgaatgaatctaaaagcgcattcgctcacaatt |
| | | atgagcttgtttggcaagacgatgatgaagaaagtgcggactgggtagaaagagaattttgggcac |
| | | tctggactgaaggcgtcccgctgcctgatgcgatcttagctgaaatccaccgtgtatctaatcgcc |
| | | gggaagtaaccgttgatgtattgaaaccagaggaagtcccagcggcggccatggcagaagcaccta |
| | | tctaccgtggaggggagcagttacagccctggcaacgctcgtttgtgactatgtttctggaacata |
| | | gggagatctatggcaaggctcgcctactattggctgacgaggtgggtgttggtaaaacgctatcaa |
| | | tggcaaccagtgcattagtcagtgctttactagacgatggacctgttttgattctggcaccttcta |
| | | cactcacgattcagtggcaaattgagatgatggacaagctcggtgtgcctgctgcggtttggtcct |
| | | cgcagaagaaagtttggctgggtgtagaggggcaaatactctcacctcgaggtgatgcctcctcta |
| | | tcaaaaaatgcccttatcgaattgccattatctctaccggactgattatgcatcagcgggagaaga |
| | | ctgactttgttaaagaagctggaatgcttctgaagaatcgtttcggtaccgttattctggatgagg |
| | | cgcataaagcccgtattcgtggaggattaggagatcaagcttcagaacctaataatctcatggcct |
| | | tcatgctgcagatcggcaggcgtacacggcatctggtactgggtactgcgacacctattcaaacca |
| | | acgtacgtgagttatgggatttattgggtattttgaactctggtgctgaatttgtactaggcgatg |
| | | ctctgtcgccatggcatgaccatgaacaagcgattccgttgataaccggccagactcaggtgacat |
| | | ctgaggctgaagtttggcattggttaagcaaccccctgccgccaagcaatgagcaccatactgttc |
| | | agcaaattcgtgactacctgtccattgataataagtcctttggatattctcatcgtttcgaagatc |
| | | tcgactatatgattcagagtctttggctctccgaatgcatgacacctagcttctttaaagagaaca |
| | | accctatcctacgccatacagtgctgcgtaagcgtaaacagctggaagatgacggtctgttagagc |
| | | gtgaggggtgaatacacatcccattaagcgcaacctagctcagtatcagtcgcggtttgtggggct |
| | | tggcattccgaccaatacaccattccaggtcgcttacgaaaaagcggaagagttcagtaagttgct |
| | | tcagtcacgcactcgagccgcaggcttcatgaaatctttgatgttgcaacggatctgctcaagttt |
| | | cgcatcaggcttaaaaactgctcaaaagatgttgaaacatacggtttctgacgaagacgaggatct |
| | | agttgaagatgttgagcacttactttcagaaatgactcctgcggaggtcgcttgtttaagagagat |
| | | tgaaacacaactgtcacgccccgaagccgttgactcaaaactgaacacagtgaaatggttcttaac |
| | | ggaattccgtaccgatggaaaaacttggctggaacacggctgtattattttcagccagtattacga |
| | | cacggcggagtggatagcgaaagaactggccaagtccttaaaaggcgaagtggtagccgtttatgc |
| | | tggcgttggtaaaagcggcttattcaggggcgaacagtttaataacgttgaacgcgaattgattaa |
| | | atccgcagtgaagacgcgcgagattctattagtggttgctacggatgccgcctgtgaaggcttaaa |
| | | cctgcaaaccttgggaacactcatcaatgtcgaccttccctggaacccatctcgtttagagcagcg |
| | | cctcgggcgaatcaaacgttttggtcagacacgtaagtttgtggatatgctcaatcttgtgtacag |
| | | cgaaacacaagacgagaaagtttataacgtgctgtcggaacgcttacgcgatacatacgacatttt |
| | | cggcagccttcccgatacgattgatgatgaatggatcgacaacgaggaagaactcaacactcgcat |
| | | ggatgaatacatgcatgaacgaaagaaagctcaagatgcgttctccgttaagtatcgcggtactct |
| | | cgatcctgatgctcatctctgggaacgttgcgctacagtactgtcacgtagggacattgtaagtaa |
| | | gctcagcgaaccatggggaagctaattatgttgtgatgtggatgccccgctcagccaaggtcctgc |
| | | acaactatgttggatgctcttttttagagggctacatcatgaattcgatcaaagttattggtacaa |
| | | ttctgagtaaatctgtctctcagggtatccatttcgagtg (SEQ ID NO: 301) |

TABLE 15-C
Sequences of validated defense systems (Sequences encoded by the genes
corresponding to rows 1-68 of Table 15-A)

| Row | |
|---|---|
| No. | Sequence |
| 1 | MIKNDKAWIGDLLGGPLMSRESRVIAELLLTDPDEQTWQEQIVGHNILQASSPNTAKRYAATIRLRLNTLDKSAWTLIAEG |
| | SERERQQLLFVALMLHSPVVKDFLAEVVNDLRRQFKEKLPGNSWNEFVNSQVRLHPVLASYSDSSIAKMGNNLVKALAE |
| | AGYVDTPRRRNLQAVYLLPETQAVLQRLGQQDLISILEGKR* (SEQ ID NO: 302) |
| 2 | MIDPVLEYRLSQIQSRINEDRFLKNNGSGNEIGFWIFDYPAQCELQVREHLKYLLRHLEKDHKFACLNVFQIIIDMLNERGLF |
| | ERVCQQEVKVGTETLKKQLAGPLNQKKIADFIAKKVDLAAQDFVILTGMGNAWPLVRGHELMSALQDVMGFTPLLMFYP |
| | GTYSGYNLSPLTDTGSQNYYRAFRLVPDTGPAATLNPQ* (SEQ ID NO: 303) |
| 3 | MNIEQIFEKPLKRNINGVVKAEQTDDASAYIELDEYVITRELENHLRHFFESYVPATGPERIRMENKIGVWVSGFFGSGKSH |
| | FIKILSYLLSNRKVTHNGTERNAYSFFEDKIKDALFLADINKAVHYPTEVILFNIDSRANVDDKEDAILKVFLKVFNERIGYC |
| | ADFPHIAHLERELDKRGQYETFKAAFADINGSRWEDERDAYYFISDDMAQALSQATQQSLESSRQWVEQLDKNFPLDINN |
| | FCQWVKEWLDDNGKNILFMVDEVGQFIGKNTQMMLKLQTITENLGVICGGRAWVIVTSQADINAAIGGMSSRDGQDFSKI |
| | QGRFSTRLQLSSSNTSEVIQKRLLVKTDEAKAALAKVWQEKADILRNQLAFDTTTTTALRPFTSEEEFVDNYPFVPWHYQI |
| | LQKVFESIRTKGAAGKQLAMGERSQLEAFQTAAQQISAQGLDSLVPFWRFYAAIESFLEPAVSRTITQACQNGILDEFDGNL |
| | LKTLFLIRYVETLKSTLDNLVTLSIDRIDADKVELRRRVEKSLNTLERLMLIARVEDKYVFLTNEEKEIENEIRNVDVDFSAI |
| | NKKLASIIFDDILKSRKYRYPANKQDFDISRFLNGHPLDGAVLNDLVVKILTPKDPTYSFYNSDATCRPYTSEGDGCILIRLP |
| | EEGRTWSDIDLVVQTEKFLKDNAGQRPEQATLLSEKARENSNREKLLRVQLESLLAEADVWAIGERLPKKSSTPSNIVDEA |
| | CRYVIENTFGKLKMLRPFNGDISREIHALLTVENDTELDLGNLEESNPDAMREVETWISMNIEYNKPVYLRDILNHFARRPY |
| | GWPEDEVKLLVARLACKGKFSFSQQNNNVERKQAWELFNNSRRHSELRLHKVRRHDEAQVRKAAQTMADIAQQPFNER |
| | EEPALVEHIRQVFEEWKQELNVFRAKAEGGNNPGKNEIESGLRLLNAILNEKEDFALIEKVSSLKDELLDFSEDREDLVDFY |
| | RKQFATWQKLGAALNGSFKSNRSALEKDAAAVKALGELESIWQMPEPYKHLNRITPLIEQVQNVNHQLVEQHRQHALERI |
| | DARIEESRQRLLEAHATSELQNSVLLPMQKARKRAEVSQSIPEILAEQQETKALQMDADKKINLWIDELRKKQEAQLRAAN |
| | EAKRAADSEQTYVVVEKTVIQPVPKKTHLVNVASEMRNATGGEVLETTEQVEKALDTLRTTLLAVIKAGDRIRLQ* (SEQ |
| | ID NO: 304) |
| 4 | MNTNNIKKYAPQARNDFRDAVIQKLTTLGIAADKKGNLQIAEAETIGETVRYGQFDYPLSTLPRRERLVKRAREQGFEVLV |
| | EHCAYTWFNRLCAIRYMELHGYLEHGFRMLSHPETPTAFEVLDHVPEVAEALLPENKAQLVEMKLSGNQDEALYRELLL |
| | GQCHALHHAMPFLFEAVDDEAELLLPDNLTRTDSILRGLVDDIPEEDWEQVEVIGWLYQFYISEKKDAVIGKVVKSEDIPA |
| | ATQLFTPNWIVQYLVQNSVGRQWLQTYPDSPLKDKMEYYIEPAEQTPEVQAQLAAITPASIEPESIKVLDPACGSGHILIEA |
| | YNVLKNIYEERGYRGRDIPQLILENNIFGLDIDDRAAQLSGFALLMMARQDDRRIFTRDVRLNIVSLQESLHLDIAKLWQQL |
| | NFHQQVQTGSMGDMFAENNALTQTDSAEYQLLMRTLKRFVNAKTLGSLIQVPQEEEAELKVFLDALYRLEQEGDFQQKT |
| | AAKAFIPFIQQAWILAQRYDAVVANPPYMGGNYMETELKNFVSSYYPQGKADLYSSFMVRLLLQLKDNRTLSLMTPFTW |
| | MNLSSFEELRKIILTNFSIQSLVQPEYHSFFESAYVPICAFSISNTPLSWNAKFFDLSDFYGEKNQAPNFQYAIKNDNKCHWK |
| | YNRITTDFLCTPGYIIAYSLPDSALSCFKTSKKLHDVCNLKQGLITGDNERYLRFWHEISYNSFSLNEKRKKTKWFPYQKGG |
| | AYRKWYGNNDYVVDWENDGYSIKNFYNDKGKLRSRPQNIQFYCKEGLTWTSLTISSLSMRYVPNGYIFDAKGPMCFPKS |
| | SLDIWNILGYANSKVIDIFLKQLAPTMDYSQGPVGNVPFKFNDGDLNEIIKELVNIHKRDWDENETSFEFKRDMLVHFSRDI |
| | NTIKGSFTLRQGENKKAINRTKFLEEMNNSFFINCFNLTDILSPEIELNKITLTHATIEIDIQKIISYAIGCQMGRYSLDREGLVY |
| | AHEGNNGFADLVAEGAYKSFPADSDGILPLMDEEWFDDDVTSRVKEFIRTVWGEEYLRENLDFIAEVLKPKKGESALETIR |
| | RYLSTQFWKDHLKMYKKRPIYWLFSSGKEKAFECLVYLHRYNDATLSRMRTEYVVPLLARYQANIDRLNDQLDEASGGE |
| | STRLKRERDSLIKKFSELRSYDDRLRHYADMRISIDLDDGVKVNYGKFGDLLADVKAITGNAPEVI* (SEQ ID NO: 305) |
| 5 | MQNQDFIAGLKAKFAEHRIVFWHDPDKRFIEELEQLKLESVTLINMTHESQLAVKKRIEIDEPEQQFLLWFPHDAPPHEQD |
| | WLLDIRLYSSEFHADFAAITLNTLGIPQLGLREHIQRRKAFFSTKRTQALKNLATEQEDEASLDKKMIAVIAGAKTAKTEDIL |
| | FNLITQYVNQQIEDDSELENTQAMLKRHGLDSVLWEMLNHEMGYQAEEPSLENLLLKLFCTDLSAQADPQQRAWLEKNV |
| | LLTPSGRASALAFMVTWRADRRYKEAYDYCAQQMQAALHPEDHYRLSSPYDLHECETTLSIEQTIIHALVTQLLEESTTLD |
| | REAFKKLLSERQSKYWCQTQPEYYAIYDALRQAERLLNLRNRHIDGFHYQDSATFWKAYCEELFRFDQAYRLFNEYALLV |
| | HSKGAMILKSLDDYIEALYSNWYLAELSRNWNEVLEAENRMQAWQIPGVPRQQNFFNEVVKPQFQNPQIKRVFVIISDAL |
| | RYEVAEELGNQINTEKRFTAELRSQLGVLPSYTQLGMAALLPHEQLCYQPGNGDIVYADGLSTSGIPNRDTILKNYKGMAI |
| | KSKDLLELKNQEGRDLIRDYEVVYIWHNTIDATGDTASTEDKTFEACRTAVAELKDLVTKVINRLHGTRIFVTADHGFLFQ |
| | QQALSVQDKTTLQIKPENTIKNHKRFIIGHQLPADDFCWKGKVADTAGVSDNSEFLIPKGIQRFHFSGGARFVHGGTMLQE |
| | VCVPVLQIKALQKTAAEKQPQRRPVDIVAYHPMIKLVNNIDKVSLLQTHPVGELYEPRILNIYIVDNANNVVSGKERISFDS |
| | DNNTMEKRVREVTLKLIGANFNRRNEYWLILEDAQTETGYQKYPVIIDLAFQDDFF* (SEQ ID NO: 306) |
| 6 | MQTHHDLPVSGVSAGEIASEGYDLDALLNQHFAGRVVRKDLTKQLKEGANVPVYVLEYLLGMYCASDDDDVVEQGLQN |
| | VKRILADNYVRPDEAEKVKSLIRERGSYKIIDKVSVKLNQKKDVYEAQLSNLGIKDALVPSQMVKDNEKLLTGGIWCMIT |
| | VNYFFEEGQKTSPFSLMTLKPIQMPNMDMEEVFDARKHFNRDQWIDVLLRSVGMEPANIEQRTKWHLITRMIPFVENNYN |
| | VCELGPRGTGKSHVYKECSPNSLLVSGGQTTVANLFYNMASRQIGLVGMWDVVAFDEVAGITFKDKDGVQIMKDYMAS |
| | GSFSRGRDSIEGKASMVFVGNINQSVETLVKTSHLLAPFPTAMIDTAFFDRFHAYIPGWEIPKMRPEFFTNRYGLITDYLAEY |
| | MREMRKRSFSDAIDKFFKLGNNLNQRDVIAVRRTVSGLLKLMHPDGAYSKEDVRVCLTYAMEVRRRVKEQLKKLGGLEF |
| | FDVNFSYIDNETLEEFFVSVPEQGGSELIPAGMPKPGVVHLVTQAESGMTGLYRFETQMTAGNGKHSVSGLGSNTSAKEAI |
| | RVGFDYFKGNLNRVSAAAKFSDHEYHLHVVELHNTGPSTATSLAALIALCSILLAKPVQEQMVVLGSMTLGGVINPVQDL |
| | AASLQLAFDSGAKRVLLPMSSAMDIPTVPAELFTKFQVSFYSDPVDAVYKALGVN* (SEQ ID NO: 307) |
| 7 | MHKYPSIIVNINLREAKLKKKVREHLQSLGFTRSDSGALQAPGNTKDVIRALHSSQRAERIFANQKFITLRAAKLIKFFASGN |
| | EVIPDKISPVLERVKSGTWQGDLFRLAALTWSVPVSSGFGRRLRYLVWDESNGKLIGLIAIGDPVFNLAVRDNLIGWDTHA |
| | RSSRLVNLMDAYVLGALPPYNALLGGKLIACLLRSRDLYDDFAKVYGDTVGVISQKKKQARLLAITTTSSMGRSSVYNRL |
| | KLDGIQYLKSIGYTGGWGHFHIPDSLFIELRDYLRDMDHAYADHYMFGNGPNWRLRTTKAALNALGFRDNLMKHGIQRE |
| | VFISQLAENATSILQTGKGEPDLTSLLSAKEIAECAMARWMVPRSIRNPEYRLWKARDLFDFISNDSLNFPPFDEIAKTVV* |
| | (SEQ ID NO: 308) |
| 8 | MNYAIDKFTGTLILAARATKYAQYVCPVCKKGVNLRKGKVIPPYFAHLPGHGTSDCENFVPGNSIIVETIKTISKRYMDLRL |
| | LIPVGSNSREWSLELVLPTCNLCRAKITLDVGGRSQTLDMRSMVKSRQIGAELSVKSYRIVSYSGEPDPKFVTEVERECPGL |
| | PSEGAAVFTALGRGASKGFPRAQELRCTETFAFLWRHPVAPDFPDELEIKSLASKQGWNLALVTIPEVPSVESISWLKSFTY |
| | LPVVPARTSITAIWPFLNQKTSINHVECVYSDTILLSTNMAPTSSENVGPTMYAQGSSLLLSAVGVETSPAFFILNPGENDFV |
| | GVSGSIEQDVNLFFSFYKKNVSVPRKYPSIDLVFTKRNKEKTIVSLHQRRCIEVMMEARMFGHKLEYMSMPSGVEGVARIQ |
| | RQTESNVIKLVSNDDIAAHDKSMRLLSPVALSQLSDCLANLTCHVEIDFLGLGKIFLPGSSMLSLDDGKFIELSPNLRSRILSF |
| | ILQMGHTLHGFSLNNDFLLVEKLVDLQPEPHLLPHYRALVKEVKTNGFECNRFR* (SEQ ID NO: 309) |
| 9 | MSYQYSQEAKERISKLGQSEIVNFINEISPTLRRKAFGCLPKVPGFRAGHPTEIKEKQKRLIGYMFQSHPSSEERKAWKSFSL |
| | FWQFWAEEKIDKSFSMIDNLGLKENSGSIFIRELAKNFPKVARENIERLFIFSGFADDPDVINAFNLFPPAVVLARDIVIDTLPI |
| | RLDELEARISLIADNVEKKNNHIKELELKIDAFSEQFDNYFNNEKSSLKIINELQSLINSETKQSDIANKAIDELYHFNEKNKQ |
| | LILSLQEKLDFNALAMNDISEHEKLIKSMANDISEFKNALTILCDNKIKNNELDYVNELKKLTERIDTLEINTSQASEVSVTN |
| | RFTKFHEIAHYENYEYLSSSEDISNRISLNLQAVGLTKNSAEKLARLTLATFVSGQIIQFSGSLADIIADAIAIAIGAPRYHIWR |
| | VPVGIISDMDAFDFIETIAESSRCLLLKGANLSAFEIYGAAIRDIVVQRQIHPTNYDHLALIATWKQGPATFPDGGMLAELGP |
| | VIDTDTLKMRGLSATLPQLKPGCLAKDKWTNIDGLHLDSVDDYVDELRALLDEAGFDGGTLWKRMIHIFYTSLIRIPNGNY |
| | IYDLYSVLSFYTLTWAKIKGGPVQKIEDIANRELKNYSAKISS* (SEQ ID NO: 310) |
| 10 | MEWRAVSRDKALDMLSTALNCRFDDEGLRISAVSECLRSVLYQYSISETEEARQTVTSLRLTSAVRRKLVPLWPDIADIDN |
| | AIHPGIMSILNSLAELGDMIKLEGGNWLTAPPHAVRIDNKMAVFFGGEPSCTFSTGVVAKSAGRVRLVEEKVCTGSVEIWD |
| | ANEWIGAPAEGNEEWSSRLLSGTISGFIDAPGNMSETTAYVRGKWLHLSELSFNKKQIYLCRMSVDNHFSYYLGEIEAGRL |
| | CRMNSLESSDDVRRLRFFLDTKDNCPLKVRIKISNGLARLRLTRRLPRRETKVLLLGWRESGFENEHSGITHHVFPEEILPIV |
| | RSAFEGLGIIWINEFTRRNEI* (SEQ ID NO: 311) |
| 11 | MINKNKVTERSGIHDTVKSLSENLRKYIEAQYHIRDEGLIAERRALLQQNETIAQAPYIEATPIYEPGAPYSELPIPEAASNVL |
| | TQLSELGIGLYQRPYKHQSQALESFLGENASDLVIATGTGSGKTESFLMPIIGKLAIESSERPKSASLPGCRAILLYPMNALVN |
| | DQLARIRRLFGDSEASKILRSGRCAPVRFGAYTGRTPYPGRRSSRRDELFIKPLFDEFYNKLANNAPVRAELNRIGRWPSKD |
| | LDAFYGQSASQAKTYVSGKKTGKQFVLNNWGERLITQPEDRELMTRHEIQNRCPELLITNYSMLEYMLMRPIERNIFEQTK |
| | EWLKADEMNELILVLDEAHMYRGAGGAEVALLIRRLCARLDIPRERMRCILTSASLGSIEDGERFAQDLTGLSPTSSRKFRII |
| | EGTRESRPESQIVTSKEANALAEFDLNSFQCVAEDLESAYAAIESLAERMGWQKPMIKDHSTLRNWLFDNLTGFGPIETLIEI |
| | VSGKAVKLNILSENLFPDSPQQIAERATDALLALGCYAQRASDGRVLIPTRMHLFYRGLPGLYACIDPDCNQRLGNHSGPTI |
| | LGRLYTKPLDQCKCASKGRVYELFTHRDCGAAFIRGYVSSEMDFVWHQPNGPLSEDEDIDLVPIDILVEETPHVHSDYQDR |
| | WLHIATGRLSKQCQDEDSGYRKVFIPDRVKSGSEITFDECPVCMRKTRSAQNEPSKIMDHVTKGEAPFTTLVRTQISHQPAS |
| | RPIDGKHPNGGKKVLIFSDGRQKAARLARDIPRDIELDLFRQSIALACSKLKDINREPKPTSVLYLAFLSVLSEHDLLIFDGED |
| | SRKVVMARDEFYRDYNSDLAQAFDDSFSPQESPSRYKIALLKLLCSNYYSLSGTTVGFVEPSQLKSKKMWEDVQSKKLNIE |
| | SKDVHALAVAWIDTLLTEFAFDESIDSTLRIKAAGFYKPTWGSQGRFGKALRKTLIQYPAMGELYVEVLEEIFRTHLTLGK |
| | DGVYFLAPNALRLKIDLLHVWKQCNDCTALMPFALEHSTCLACGSNSVKTVEPSESSYINARKGFWRSPVEEVLVSNSRLL |
| | NLSVEEHTAQLSHRDRASVHATTELYELRFQDVLINDNDKPIDVLSCTTTMEVGVDIGSLVAVALRNVPPQRENYQQRAG |
| | RAGRRGASVSTVVTYSQNGPHDSYYFLNPERIVAGSPRTPEVKVNNPKIARRHVHSFLVQTFFHELMEQGIYNPAEKTAILE |
| | KALGTTRDFFHGAKDTGLNLDSFNNWVKNRILSTNGDLRTSVAAWLPPVLETGGLSASDWFAKVAEEFLNTLHGLAEIVP |
| | QTAVLVDEENEDDEQTSGGMKFAQEELLEFLFYHGLLPSYAFPTSLCSFLVEKIVKNIRGSFEVRTVQQPQQSISQALSEYA |
| | PGRLIVIDRKTYRSGGVFSNALKGELNRARKLFNNPKKFIHCDKCSFVRDPHNNQNSENTCPICGGILKVEIMIQPEVFGPEN |
| | AKELNEDDREQEITYVTAAQYPQPVDPEDFKFNNGGAHIVFTHAIDQKLVTVNRGKNEGESSGFSVCCECGAASVYDSYSP |
| | AKGAHERPYKYIATKETPRLCSGEYKRVFLGHDFRTDLLLLRITVGSPLVTDTSNAIVLRMYEDALYTIAEALRLAASRHK |
| | QLDLDPAEFGSGFRILPTIEEDTQALDLFLYDTLSGGAGYAEVAAANLDDILTATLALLESCECDTSCTDCLNHFHNQHIQS |
| | RLDRKLGASLLRYALYGMVPRCASPDIQVEKLSQLRASLELDGFQCIIKGTQEAPMIVSLNDRSIAVGSYPGLIDRPDFQHD |
| | VYKSKHTNAHIAFNEYLLRSNLPQSHQNIRKMLR* (SEQ ID NO: 312) |
| 12 | MKKVYELTSEEALSYFLRHDSYTTLELPAYINFTTLLNDINSSIHNKKIKIEPTAKELMGKDINYEVLVSKDGLYSWRRITLI |
| | NPLYYVYFCRKITAPATWEIITEKFKSFESNDLFTCSSIPVRKDNSSNIAASVMNWWEDFEQKSLALALEYEFMFSTDISNFY |
| | PSIYTHSFEWVFISKEEAKKKKSKNNPGGLIDSHIQMMMNNQTNGIPLGSTLMDTFAELILGQIDIELRKKTNELKIINYKVV |
| | RYRDDYRIFSNSKDDLDIISKCLVNVLGDFGLDLNSKKTELYEDIILHSLKQAKKDYIKEKRHKSLQKMLYSIYLFSLKHPNS |
| | KTTVRYLNDFLRNLFKRKTIKDNGQQVDAMLGIISSIMAKNPTTYPVGTAIFSKLLSFLYGDDTQKKLTKLEQLHKKLDKQ |
| | PNTEMLDIWFQRTQAKINLEWNKSYKSALCVRINDELTKEKTFSVNNLWNIDWIQGKETSPNKAKILSLLRKTKIVDTDKF |
| | DKMDDNITPEEVNLFFKEHSN* (SEQ ID NO: 313) |
| 13 | MSLHDKLLMHNFALANKKSPDFISELPQIEPKPYSNGHKIKWINHTLTSTEVTPPDNLIKICILIESGEIAITSVSDIANLLGYP |
| | AGQLLYILYRKKDNYRTFEIEKKNGKKRVINAPCGGLSILQTRLKPVLEYFYRPKKSAHGFIKGKSIITNAGMHIKKNFVVNI |
| | DLENYFESISFARVYGIFKSKPFNFAHPAATVLAQLCTHNGKLPQGACTSPILANIASASLDKQLTQFAGRKKISYSRYADDI |
| | TFSFNQRNIDIIKKNDDGSYSLSETIDNIISKNGFKINYDKFRVQTRNTRQSVTGLVVNDKVNINRRYIRITRSMIHRWTDDK |
| | LKYALLFATEKGYQAKDNNHAIQIFRNHIYGRLSFIKMVRGKDYPGYLKLMSYMSHNDPLKTQEGLRAMKETENFDVFIC |
| | HASEDKKDIAIPIYDELTKLKISAFIDHVEIKWGDSLIDKINAALVKSKYVIAILSANSVNKEWPQKELRAVLASEISSGDVKL |
| | LTLLKKEDEEVVNLSLPLLSDKFYMVYDNNPEVVANNIKSLLQR* (SEQ ID NO: 314) |
| 14 | MTKTSKLDALRAATSREDLAKILDVKLVFLTNVLYRIGSDNQYTQFTIPKKGKGVRTISAPTDRLKDIQRRICDLLSDCRDEI |
| | FAIRKISNNYSFGFERGKSIILNAYKHRGKQIILNIDLKDFFESFNFGRVRGYFLSNQDFLLNPVVATTLAKAACYNGTLPQG |
| | SPCSPIISNLICNIMDMRLAKLAKKYGCTYSRYADDITISTNKNTFPLEMATVQPEGVVLGKVLVKEIENSGFEINDSKTRLT |
| | YKTSRQEVTGLTVNRIVNIDRCYYKKTRALAHALYRTGEYKVPDENGVLVSGGLDKLEGMFGFIDQVDKFNNIKKKLNK |
| | QPDRYVLTNATLHGFKLKLNAREKAYSKFIYYKFFHGNTCPTIITEGKTDRIYLKAALHSLETSYPELFREKTDSKKKEINLN |
| | IFKSNEKTKYFLDLSGGTADLKKFVERYKNNYASYYGSVPKQPVIMVLDNDTGPSDLLNFLRNKVKSCPDDVTEMRKMK |
| | YIHVFYNLYIVLTPLSPSGEQTSMEDLFPKDILDIKIDGKKFNKNNDGDSKTEYGKHIFSMRVVRDKKRKIDFKAFCCIFDAI |
| | KDIKEHYKLMLNS* (SEQ ID NO: 315) |
| 15 | MNKKFTDEQQQQLIGHLTKKGFYRGANIKITIFLCGGDVANHQSWRHQLSQFLAKFSDVDIFYPEDLFDDLLAGQGQHSLL |
| | SLENILAEAVDVIILFPESPGSFTELGAFSNNENLRRKLICIQDAKFKSKRSFINYGPVRLLRKFNSKSVLRCSSNELKEMCDS |
| | SIDVARKLRLYKKLMASIKKVRKENKVSKDIGNILYAERFLLPCIYLLDSVNYRTLCELAFKAIKQDDVLSKIIVRSVVSRLI |
| | NERKILQMTDGYQVTALGASYVRSVFDRKTLDRLRLEIMNFENRRKSTFNYDKIPYAHP* (SEQ ID NO: 316) |
| 16 | MKSAEYLNTFRLRNLGLPVMNNLHDMSKATRISVETLRLLIYTADFRYRIYTVEKKGPEKRMRTIYQPSRELKALQGWVL |
| | RNILDKLSSSPFSIGFEKHQSILNNATPHIGANFILNIDLEDFFPSLTANKVFGVFHSLGYNRLISSVLTKICCYKNLLPQGAPSS |
| | PKLANLICSKLDYRIQGYAGSRGLIYTRYADDLTLSAQSMKKVVKARDFLFSIIPSEGLVINSKKTCISGPRSQRKVTGLVIS |
| | QEKVGIGREKYKEIRAKIHHIFCGKSSEIEHVRGWLSFILSVDSKSHRRLITYISKLEKKYGKNPLNKAKT* (SEQ ID NO: |
| | 317) |
| 17 | MSVIRGLAAVLRQSDSDISAFLVTAPRKYKVYKIPKRTTGFRVIAQPAKGLKDIQRAFVQLYSLPVHDASMAYMKGKGIRD |
| | NAAAHAGNQYLLKADLEDFFNSITPAIFWRCIEMSSAQTPQFEPQDKLFIEKILFWQPIKRRKTKLILSVGAPSSPVISNFCMY |
| | EFDNRIHAACKKVEITYTRYADDLTFSSNIPDVLKAVPSTLEVLLKDLFGSALRLNHSKTVFSSKAHNRHVTGITINNEETLS |
| | LGRDRKRFIKHLINQYKYGLLDNEDKAYLIGLLAFASHIEPSFITRMNEKYSLELMERLRGQR* (SEQ ID NO: 318) |
| 18 | MTKQYERKAKGGNLLSAFELYQRNSDKAPGLGEMLVGEWFEMCRDYIQDGHVDESGIFRPDNAFYLRRLTLKDFRRFSL |
| | LEIKLEEDLTVIIGNNGKGKTSILYAIAKTLSWFVANILKEGGSGQRLSEMTDIKNDAEDRYSDVSSTFFFGKGLKSVPIRLSR |
| | SALGTAERRDSEVKPAKDLADIWRVINEVNTINLPTFALYNVERSQPFNRNIKDNTGRREERFDAYSQTLGGAGRFDHFVE |
| | WYIYLHKRTVSDISSSIKELEQQVNDLQRTVDGGMVSVKSLLEQMKFKLSEAIERNDAAVSSRVLTESVQKSIVEKAICSVV |
| | PSISNIWVEMITGSDLVKVTNDGHDVTIDQLSDGQRVFLSLVADLARRMVMLNPLLENPLEGRGIVLIDEIELHLHPKWQQ |
| | EVILNLRSAFPNIQFIITTHSPIVLSTIEKRCIREFEPNDDGDQSFLDSPDMQTKGSENAQILEQVMNVHSTPPGIAESHWLGNF |
| | ELLLLDNSGELDNHSQVLYDQIKAHFGIDSIELKKADSLIRINKMKNKLNKIRAEKGK* (SEQ ID NO: 319) |
| 19 | MRELARLERPEILDQYIAGQNDWMEIDQSAVWPKLTEMQGGFCAYCECRLNRCHIEHFRPRGKFPALTFIWNNLFGSCGD |
| | SRKSGGWSRCGIYKDNGAGAYNADDLIKPDEENPDDYLLFLTTGEVVPAIGLTGRALKKAQETIRVFNLNGDIKLFGSRRT |
| | AVQAIMPNVEYLYTLLEEFDEDDWNEMLRDELEKIESDEYKTALKHAWTFNQEFA* (SEQ ID NO: 320) |
| 20 | MKLLDKKYYNLEPKYEYLKDSFILGLAWKKTDSFVRTHNWYADILELDKCAFDISDEVTNWSNEISKNALSKSDIELIPAP |
| | KGASWFINQGKWTTNKDNRKIRPLANISIRDQSFATAVTMCLADAIETRQKDCSLSNLGYAEHVKNKVVSYGNRLVCDW |
| | DNERARFRWGGSEYYRKFSSDYRSFLQRPIYIGRETVNKVSGIDDVYIISLDLKNFFGSIKINLLLEKIKKISADHYAAKFIND |
| | NEFWTLANRILSWDWPEESLSLLESLDIKEKNVGLPQGLASAGALANAYLIEFDESLISKLRTKIEDSQIILHDYCRYVDDIR |
| | LVISGEALESNKIKESIHALVQGILDETLAQNPSDNEPYLKINDSKTYILELSDIDNGSGLTNRINEIQHEVGASSIPERNGLDN |
| | NIPALQQLLLTEQDNFSEDVDSLFPGFKNDKSIKVESVRRFSAHRLEKSLAKKSKLISPEERKQFDNETSLIAKKLLKAWLK |
| | DPSIMVIFRKAIAINPNLDAYSTILEIIFSRIQRNRDKRDKYIMLYLLSDIFRSVIDVYRNLESEYVDDYQKLMGEVTLFAQKIL |
| | SCKSFIPNYAYQQALFYLAVINKPFIASNKASFDLARLQCVLIKQHLEPLNSSDGYLFEVSAQISKDYRANAAFLLSHTNSNK |
| | VVDLIIEKFAFRGGEFWNAIWKEIVRMQDKDRINEFRWAISKYESKPNSSEHYLSSVISFKENPFRYEHALLKLGVALVELF |
| | DDTEKNVWQPDGKQYSPHEIKVKLEGNSTSWGELWRPNFSISCSIDKKGEPGKDPRYISPEWLANYPQTQNDEQKIYWVC |
| | SVLRSAALGNVDYTQRNDLKLDKAKYDGIHSQFYKRRMGMLHTPESIVGSYGTITDWFASFLQHGLQWPGFSSSYISQEDI |
| | LSITNIIEFKNCLLERLGYLNKQICISSNVPTLPTVVNRPELASNHFRIVTVQQLFPKDTNFHPSDVTLANPDVRWKHREHLA |
| | EICKLTEQTLNAKLKTESREHTSTADLIVFSELAVHPEDEDIVRALAFRTKAIIFSGFVFCEQDGRIVNKARWIIPDSSESGTQ |
| | WRVRDQGKHHMTSDEVALGIQGYRPSQHIISIEGHPEGPFKLTGAICYDATDIKLAADLRDLTDMFVIAAYNKDVDTFDN |
| | MASALQWHMYQHIVITNTGEYGGSTMQAPYKEKYHKLISHAHGTGQIAISTADIDLAAFRRKLQIYKKTKTQPAGYNRKH* |
| | (SEQ ID NO: 321) |
| 21 | MDTLVKLATIISPLISAGVAIWAILVAKKTISESKEIAKKTIADTAYQAYLQLAMENPQFSKGYSADCRQERDPMYDQYVW |
| | YVARMIFCFEKIIEVEVNLKDSSWANTLEKHLKFHSEHFKKTNVVEEALYIPPILDLIRCAAN* (SEQ ID NO: 322) |
| 22 | MNNDDYPWFRKRGYLHFDEPVSLKKAVKYVSSPEKIIKHSFLPFLSFEVKSFKIKKDKSTKQLSKTEKLRPIAYSSHLDSHIY |
| | AFYAEYLTGHYELLIQENNLHENILAFRSLNKSNIEFAKRAFDTITEMGECSAVALDLSGFFDNLDHQILKHQWCKVIGTEA |
| | LPQDHFAIYKSITRYSKVDKNRAYEILGISKNNPKYNRRKICTPVDFRNKIRKNGLIIVNNSQKGIPQGSPISALLSNIYMLDF |
| | DIEMRDYAQERGGHYYRYCDDMLFIVPTKYNKTLAGDVAQRIKHLKVELNTKKTEIRDFIYKDSTLVANMPLQYLGFIFD |
| | GSNILLRSSSLARYSERMKRGVRLAKATMDSKNRIRENKGEALKALFKKKLYARYSHIGRRNFLTYGYRAAKIMNSKAIK |
| | RQLKPLQKRLENEILK* (SEQ ID NO: 323) |
| 23 | MLNQSFSVSNLIKLLKKTDPKRYKIGRNSAEYKKYIADKVNGSIETYSFGSISNSRINNKNVYIFKDFMDVLVARKINDNIKR |
| | VYSVKQNNRHDIIKKVNTVLSEPVNYYIYRLDIKSFYESIDKNIVFQRINNNPIISHNTKKFINGLFKHNAFSANNGLPRGMG |
| | LSATLSEIFMEEFDAELARLPEVFYASRYVDDIIVFSFYKIPDYKNYFSRILPNGLHLNERKCSEYTIEDTSTKHSEIEFLGYSFI |
| | IHHGLKNQRRHVVIRISEEKIKKIKRRIALAVKDYSNNSDAELLKKRIKYLTGNILVNSNSNKTDALYSGIYYNYQHLTDKT |
| | QLKELDIFKNRMLFSSKGEVGRKILAAGHNLLTAPKKYSFLAGFEKRLLSSFKREDIIKINKVW* (SEQ ID NO: 324) |
| 24 | MKIKISKSDYKRVLLTDILPYEVPILFSNEGFYKLISENKVLPGTFSEGLKLDSYTIPYSYKIKKGLASSRSLGIIHPSTQLRICD |
| | FYDKYEHLMVHMCTKSPFSLRYPSKIGSYYYEKDFLKSRINLKDGLVQFHNHGFDSQETSSSSHFSYKKYPFIYKFYESYEF |
| | HRLERKFRKLLKLDIAKCFSHIYTHSVSWAVKSKEFSKVNRTYNSFEGCLDKLFQDANYGETNGIIIGPEFSRIFAEIILQRVD |
| | LNVESHLNLEPGIVKDKSYAIRRYVDDYFIFADDDETFKLIEFVLANELEKYKLYLNESKKEFIERPFVTGATMAKNDIAEII |
| | EDLYGSLIHTEKLDELTAMVNLNPDVKIQPENMNDLFPLKGVWNKKLHADKFIKRIKIAVRKNNTTFDLVSSYLLSAIKSK |
| | FFKVIRLLRMFDLSGKEDITYKFFSIFNEVIFFIYAMDFRVRQTYIISQVILEINSFANKQASDISEVIKKNTFDELLMCMKSMG |
| | NIHERPVELSNLLICMKGLGEQYKLNPDEFKDLLGISENECFYDLEYFSICSMLHYIGDDVLYLKMKEDIVLAIQSLISGRND |
| | IKKDTETFMLFLDMMTCPYLTVKHKRHYRTYVEANTGQKRFTNAVIDSEIDSLKNNVIFFNWSGDADLEHVLYKKELRTA |
| | YE* (SEQ ID NO: 325) |
| 25 | MVIFDEKRHLYEALLRHNYFPNQKGSISEIPPCFSSRTFTPEIAELISSDTSGRRSLQGYDCVEYYATRYNNFPRTLSIIHPKAY |
| | SKLAKHIHDNWEEIRFIKENENSMIKPDMHADGRIIIMNYEDAETKTIRELNDGFGRRFKVNADISGCFTNIYSHSIPWAVIG |
| | VNNAKIALNTKVKNQDKHWSDKLDYFQRQAKRNETHGVPIGPATSSIVCEIILSAVDKRLRDDGFLFRRYIDDYTCYCKTH |
| | DDAKEFLHLLGMELSKYKLSLNLHKTKITNLPGTLNDNWVSLLNVNSPTKKRFTDQDLNKLSSSEVINFLDYAVQLNTQV |
| | GGGSILKYAISLVINNLDEYTITQVYDYLLNLSWHYPMLIPYLGVLIEHVYLDDGDEYKNKFNEILSMCAENKCSDGMAWT |
| | LYFCIKNNIDIDDDVIEKIICFGDCLSLCLLDSSDIYEEKINNFVSDIIKLDYEYDIDRYWLLFYQRFFKDKAPSPYNDKCFDIM |
| | KGYGVDFMPDENYKTKAESYCHVVNNPFLEDGDEIVSFNDYMAIA* (SEQ ID NO: 326) |
| 26 | MTSTIDFYESDFSATLYPLKTNQILLKHHSQEMSEYIYQKVINPAYPTDSFLSQQKVFSTKPKGHLRRTVKLDPVAEYFIYD |
| | VIYRNRKIFRPEVSESRKSFGYIFRNGSRIPIHVSYNEYKQSLKKYSELYSHSIHFDIASYFNSLYHHDIIHWFSSKEGVSPADV |
| | EALGQFFREINSGRSIDFMPQGIYPAKMIGNEFLKFVDLHGRLKSAQIVRFMDDFTIFDNDIETLNNDFIRIQQLLGQVSLNIN |
| | PSKTTFDNVMGDVNETLTQIKSSLKEIITEYEHIPTASGVEVVETNIEIIKHLDDEQVNKLIDLLKDEKIEESDADLILGFLRTH |
| | NDSLLSQMPMLLGRFPNLIKHIYTICSGITDKSGLVKILLSYLNTNNNFLEYQLFWIGAIVEDYLLGVGEYGSVLHKLYELSG |
| | DFKIARAKVLEIPEQGFGFKEIRNEYLRTGQSDWLSWSSAIGTRNLKSAERNYILDYFSKGSPINYLVASCVKKL* (SEQ ID |
| | NO: 327) |
| 27 | MTSEIVLNLDFPEYKDDFCTDSIDEQDNELWQQQANKKLLSFLEVMGEEARRYKENNSRSTHPHYKTLSSYHHAIFISGAR |
| | GAGKTVFMRNARFSWQKHYNKDLKRPKLYFIDVIDPTLLNIDDRFSEVIIASIYATVEKRMKQPDIAQNIKDNFINSLKTLS |
| | GALGKSKDYDEYRGIDRIQKYRSGIHLEKYFHQFLISSVELLDCDALVLPIDDVDMKIDNAFGVLDDIRCLLSCPLVLPLVS |
| | GDNDLYRFIAKSKFEELLNRKANSNYAKEGSEIAERLSEAYITKVFPSHVKIPLQPIDELLPYLYIHSNEDENKQHTSYSEFIK |
| | LVQQKFYFLCNGQERSTNWPQPRSAREVTQLIRSLPPSTLSKEDDSGTDLWQRFAVWAEERRDGLALTNVESYLFIKNAK |
| | AVEDLNLSNLIAFNPLLQKGKYPWAEKDFYKQQSQRRKELNAPETNSGILNTVFSEQRKDFILRSMPALELIMEPMYVTKT |
| | VAEKNDNSALIAIYTHSDYYSQQQNRRCHIFFGRAFEIMFWSVLAKTENLPQEFYEKDKFKSLFGNIFKKVPFYSIFSMNPT |
| | KVVDEENDDGSEPDFSQKLDDSINELVEDIYIWATSNKLRAFKNKNLIPLMTCVFNKVFSQINVLRKNVQDRVKFRDEHLS |
| | DLAKRFEYMFINAIFTFIREGVVVNTNVATGAAPARVRNLSEFNRYDKTLSRNMSGILSVKEDNGLTIVKESEGDIADLLFEI |
| | WHSPLFKLTTRTCYPIGKINSQNTAQENLSSDFNSFFENGINFELIKQYYWQTSNHDNIRTADVREWATSRLNEAIILFSWM |
| | KESKSIKAKIDGQSYEGRLFRGLQQALEGYEEV* (SEQ ID NO: 328) |
| 28 | MFNQDPYWLIPTLCLASDRIFYAQLRDHLGQKSSGERKKEKNGYILVQAAQDYQFYFGGRIRKEDVQNNALMWQIETGN |
| | ENCLSMLDSLSAYFLTWRGNCFEVRRERLEPWLMICSVIDPAWIIAYAYQQLIKQNVVCDSELISLLTEHQCPFAFPKGRGD |
| | ISFADNHVHLNGHGYSSISMLNFIDGNYKVKKGIKWPYRQEYTLFESGLLDKNDLPRWLSAYSSCLLKNVYNSFQQGKRS |
| | EVDFTCLKDAVETVLADEDKYYFLEVASLYDVVTLQQRVLYEAAQQKYHSHQRWLLYTCGIMLGTESEDYANALANLIR |
| | ISNILRNYMVVSAVGLGQFIDFFGFNYRRITKPADTNNRVHYDSSAGISREYRVSPDFVLGSGVMPDIYARQLFDFYCTQAR |
| | KGVPEQGHIVVHFTRSFPDKKSTYDKLLTECRERLRSQCDYFGRFLTSLTLQSIEYKNLSTDEDRSIDIRKLVRGYDVAGNE |
| | NELQIEVFAPVLRVLRAAKFKGEGVNFKRLQRPFITVHAGEDYCHILSGLRAMDEAVEFCMLGEGDRIGHGLALGVDIKL |
| | WANRQKRAYLTVGQHLDNLVWAYHQAVLLSQHIVEHIPVMHELRDKIHYWSHQLYSETYTPDLLFKAWLLRRNWPDYK |
| | SIISDPANINEWVPDQHILVSTDETTAKARKIWERYLNSGLAENDVFNRIISVNCAPDTAQNFSMTFNENEDILSKGELLLYE |
| | AIQDFLIEKYSRLGLVIEACPTSNIYIGRLEKYHEHPLFRWNPPDSQWIKPGGKFNRFGLRTGPLSVCINTDDSALMPTTIENE |
| | HRLMRDCAIHFYGIGTWMADLWINSIRIKGIEIFKGNHLSQDLDNLI* (SEQ ID NO: 329) |
| 29 | MNTIYIPLDSGESAVLKDPDTLLPRNIYEQLTRFIEKAVNEVPKPHEALNETRSHKAISIDGARGTGKTSVLVNLNDYLQSN |
| | AQQLAGKIHILDPIDPTLLEDGESLFLHIIVAAVLHDKEIKTAQSRDLDKSRVFTQKLENLAHGLESVDLQQNQRGMDKIRS |
| | LYGSKHLANCVEEFLKSALELIGKKLLILPIDDVDTSLNRAFENLEILRRYLTSPYVLPVVSGDRRLYDEVCWRDFHGRLNK |
| | DSAYNRKNTYDIARDLAIEYQRKILPLPRRLSMPDVSDYWQQDGIEVTLDKNGIPLRNFMAWLKIFITGPVNGLEGSDLPLP |
| | IPSIRALTQFINHCRDLIRELPEPFRKKVSTLALRRMWQMPDVPLDVLESFAEKHRELSKEAKREYGEAYKLFYDGLKNFTA |
| | WDSKAYLEDDKQSAWLDRLCEYFRFEPKAGAVFLTLQAKQFWVSWAQGDNRNQSILATPLFQPLLHNFREYDVFERYDD |
| | LSDWESQLRTRLPESWLTAIKGQKTLLPYPVAEAGINTSLKWRYWEELENYGFDPALESKANFLLSTLMQRNFYTNSKQS |
| | VVINIGRVFEIIIASLVSDLELADLQRIRQRSPFYSASALAPTKTLDLEEDFTKKNTRFMNNRSETDRDISDDILVDVPDKNED |
| | AWKKICDEINHWRKTHNVASTNLSPWLVYKVFNKTYSQVANNVFVPSGMQNVDAALNVFGRVFYAVWSAFGSFEKGEL |
| | FGLSDVVATTNIISAKNFYNHDNFRVNVGPFTPEQNQNSDSDREAYQHRKMYGEKTRAVSYVLATHPLKKWIDEVLRTEF |
| | KQKQNAQIQTERKMPIQAEKIIDISPAREFITRKLSLNSHSRLVKTRIIKQLKMLYPNYDKAKDFIDEVTNHFPQNDPAINTLQ |
| | KAFAELYPDGDK* (SEQ ID NO: 330) |
| 30 | MLTRSLSEHAAGCFFTDERLSQRFLDILLSPPKDFETWSSLQEESFKLLVKSIDSRYPRTYRLTDVRQLVGNICDNGLLTSPT |
| | LPWLDVIADQLLLRNGDLLYYRENKVQDYVRIAAELDPALLVGWRLGDWLLQSPPPRLTDITRVVMAQNPFFAPPANAG |
| | KPFAEGHVHLGGVTAGDTILDGYLFEEIELPKSKDMLLWAHKEHDELTPLINRAKSLLTVLLSAPPQTVSEQTQNGFDQRK |
| | TVSEKYKALQNPMDSIHRLPDWLLLAKKNRGTESVSPGWFLNQLAHASEKKHPSRWLWLQLYLCHSYQLKDTHPLERTA |
| | ILCFWLTVNALRRHIIMDGQGLACFTERYFNGALRAGKKADSSNMRYLFAGKDDVAEVKASPKAFDHEMVTGFSSTLLKT |
| | LGIPAVFPPYIFGEHEIKPDERVLRYIGALERWQFCGHFSRSKTASRGKRAKADLQANWTEAERLLQKLYSHNGWNHPVFL |
| | GGKRNPHFHFQPSNWFRGLDVAGDENVLKIAGFAPMLRWLRSGLYPVPEGLRASMSFHFSIHAGEDYAHPASGLRHIDET |
| | VRFCEMREGDRLGHALALGIEPALWAKRHGEMILPLDEHLDNLVWQWHYATLLSASLPLAQAVLPLLERRIARFIARCEW |
| | CKKRPPQIDNSVVGKQACSDDKPLENITPDTLYRAWLLRRNCSYRLQQLHGGSPLTSQEKCALPDWATLSDKGNVAAQLY |
| | QQRHSSLLDDMPPQLVVVRVADEWGTQELIGLGNPGKLRQQALDGKDILQDIDTPVELQFMHALQDYLLDHYDRKGLIIE |
| | TNPTSNVYIARFKKHVEHPIFRWNPPDEELLKPGAEFNRYGLRRGPVRVLVNTDDPGIMPTTLRTEFLLLREAAIERGVSRT |
| | MAEYWLERLRLYGLEQFQRNHLNVFEVIE* (SEQ ID NO: 331) |
| 31 | MSGTFPYLQYTDVNGLQPKLKEELKNLRRKEYLSYWPRFLIRRISLYALPFLMFFTFFFCLSLTKKVGAEEVTNILGTVSISF |
| | SSCLLLGIIISGVVLLLQWTCFNCKYSPQDTNGVVGARKLNYKLLAHVVFVIACVLLFVFIYCTNNKVFYGFIVFLGLTLLPL |
| | VIDRTLGVTRQNERHKLYIRRLERLDELNILREKMNIKFEESHFIEYMKLVDEADHGKNQDTVSDTSYFMTLIENKLKV* |
| | (SEQ ID NO; 332) |
| 32 | MKIVSNTVWDGLKLPDYRARFFIEVWKEILYVNTPSFYQSKMINTMSGAEELVEAIDDYIQDDKSKKSLLSMIEDYKGNLK |
| | KDSIAKDTFKNLHATLLKKIETVPDPISSNYILELKTIVKLVLSKESDYYHELKKQLKSSILSNADLNKKARLMDSIYQLTKS |
| | FIGYLLWKGYSPTYLYNRMEYLTRIKNYGSRDFSAQFNSCLDKLTIRIHDYTVYFLITPLSKYLIELNNILDVSFINREGIINEK |
| | NYNKISQGVESSVLAKIVVNTTDYVSAAWQANEKLDKVIDYLEIEKPEYNIRYSPVCLTEFSNGRFTHRQTINIGRLKQFITS |
| | KNYSILENIPNESKVLLRESIKLDRYDVLTRSLRYLRVAKESTSLEQKLLGVWIALECIFESTSGNIISGITNHIPTFYSTQSLEI |
| | RIRYSKDLLEARLKPISDSLLEITANQKSKFRDLSLKEYFDIVKIEKNRNKIFDELVSKGDEFAVFRLIKIFESFGTSKKINDRF |
| | NDTKKDVESQLYRIYKVRNKITHRAYYGNIRPQLVDHLYSYLLSAYSTLIYSLRYNAINKFEPQDMFNAYIISCESLIFNVEE |
| | EKKLENITMDEIILS* (SEQ ID NO: 333) |
| 33 | MVAIKMYPAKDGDAFLIICDEEKSAFLIDGGYAETFRQHILPDLRELSFNGYRLRLVMATHIDSDHIGGLVDFFLVNGHAAE |
| | PAVITVDRVWHNSLRAMTRPENNAQKVDSREITDFLRRRYHVEADKAKPHEISARQGSSLAASLLAGDYHWNEGKGYQC |
| | ICTGTSIPNLMCDNSLTILSPSKERISALCLWWRRQLASLGFSGRSSSSEAFDDAFEFFCKREASQVPLPHVINARTPLLERDY |
| | ARDTSPTNGSSIAFSLVLNKKRILMLGDAWAEEVVTSLGASGASHHFDIIKISHHGSIRNTSPNLLKIIDAPVYLISTDGKKHA |
| | RHPNLAVLKAIVDRPAAFTRTLYFNYANSASAFMKNYLSASGAQFRIIEGSTDWITL* (SEQ ID NO: 334) |
| 34 | MRYAATETEIRNATVLIECAGYTGSGTLIAADKVLTAAHCVVSDDPETPITVTFFGADEDVCVNATISEIDTSCDACLLTLS |
| | DSVDIPPITLMTQPEREGSQWKAFGYPASRNGPSHYLHGTISQILPRLFHGVDMDLSVSADCVLEEYSGVSGAAILSENKCI |
| | AMVRIRMDGGLGAVSLDKLSGLLIRNGLIPDDIASLPDSSLSGEVVLNRTEFRDNFESFVLEHKGRAVLLEGSPGSGKTTFC |
| | RHYQPRSEQLAVAGVYEFTPEDGAGTTFKILPEVFADWLHNQVSILLSGRPARREETEKINLTQKVSDLLHTFSDYWKHKG |
| | KYGVIFIDAVNEASECGDEAVSRFTALLPVTLPENVKLVFTAPSLSSAGKAFRHWLTPQDCISLTLLSHREVLQLTARELKT |
| | SAPSLSLLTRVSDIAQGHPLYLRYILGYLKANPDQVNLEIFPVFSGSIETYYERLWQGLVKDESAVNLLGILSRMRWGIDISS |
| | LIPVLTPQEQTVFVPTLDRIQHLLLNDKSSALCHQSFAAFINSKTAVINSLLHGRLADFCLTSGESYGLINRAYHLLLASHDR |
| | HPEAALVCTQEWADACIVKGAQPDILIHDIRQTLKNTLIRADAVASIRLLLLFQRMTFRHHFLFLQSAYHSGLALAALGRPD |
| | EALEQLIPSGSLVVDAVDAIVSAQTLARMGNSEHALKLLEKVKSAVDQEFERNPVNLSDFIGLSLAWVRAELMAGVVDGH |
| | GRTREVVEYLYGCGQVVRDNFEQSAHSKSAYTRAFYPLQAEMEAVNIAFNDRSVSLRTVKEKFGSLPENILDLMLSSVMR |
| | AHDIILQHQLPMPQHALQPVWYNLDRLLHTDIPYSNEIRFNSLSSLIFFNAPSALIIRMAGVFSFEVVPEITLLNEENEIAADSI |
| | DVSEQGQLWLVSAYLNETQPCPDIKHPSQGCSEWLKTLTEAIFWYSGQARRAVIDGNDEKKELLLVKVQNDILPALSYSLE |
| | ERMAWPNSWAMPEQIIPMIYEELVNMFGACWPDKISVITDFILAHTPQQCGLYSEGYRRLLNRVIQTLLNEHRFLGQSDTTF |
| | QLLETLHAFVSAFTENRQELVPELLNIIPAYISLDAPQLAQDTYTELLGVSMGPDWYKEDQFALMTTMLRVIPQHTDTNTT |
| | LSQVAGFLEHASGEMTFRRYVRQEKSQFIGELIRRGNYAHGFNYYRQQSCGSHEEMLTQLSHPAADSPHPLKGMRFPGGA |
| | LDEEHAVECIVSELRNRVDWRLRWGLLEIFSFGSIGNLAVPFAELINEFSADTEDLNEIPKRLHNILHGDVPFSEHRNFIKNFT |
| | EHLADNHKPLFAEFISLLSEDTSDNDVKPPPSGDANQKGTDTSDDVAMQPGLFGKRSAINRAEACMENARKAAARRNTVR |
| | ASELAVESLHIIQDGDWSVWRKNNHLAELTRTYILDNSADAGSVIRAYASLVEKERYAPAWVIASHLIEIAASKFSDQEAQ |
| | AINQIVLEHNRHMLGNTEADAAHFSFLNEPDTSDAGEETLYFLFWLLEHPLKFRRERALEVLKWLASDDDKILGQCVTEAL |
| | VSDIASRAEALMALTDWVSARSPQRIWDFIVKERSLFEWLEGTTALSQVHLLERVTSRAGFVLRNEIAAFERPRKLLLTSEA |
| | SGQRNIPENLPTWVQSLSQTLAVMEKQGIDIPALLTLLEKRVLQQSGLADITVAFELEKLLARGFTVNRTPSHHRWETMVR |
| | FALNQIIHEAAAQDELQNIEPLLRAWNPASEECVEPWEVCNRAKQIICAVMEGRHQQASGIEDGFFLHYLDEVEVSREGQT |
| | HLVEISAVLTTAHNGHESLRPGAESEFNATQTPDIERTLSVHLTCQRVKMQPLLFGGATPAAVSKKFMQMTGTLPSDFIRR |
| | QWRSGRSLSKNRWGEPISRGSLLLMKRTTTLPPGLGLAWYVTVDGKLMNIFSYAPRRR* (SEQ ID NO: 335) |
| 35 | MKYSSMETPKTREEFEARCFHLLNAIKLGRYHGIPGEGNKEQVPFLPNGRVDLANIDTMTRLSMNSLYDFHYNRDNYPQF |
| | DLSENDENEEATD* (SEQ ID NO: 336) |
| 36 | MEPISITVATYVATKLIDQFISQEGYGCIKKALFPQKRYVDRLYQLIEETAIEFEETYPVESGAIPFYHSEPLFEMLNEHIFFKE |
| | FPDKEILLDKFKEYPSITPPTQQQLSLFYEMLSLKINNCSKLKKLHIEETYKEKIFDINEELIQVKLILRSIDEKLTFHLSDDWL |
| | NEKNSQAIADLGGRYTPELNVKLEIAEIFDGLGRTNDFSKIFYSHIDSFLVAGKKLHSCDVISSELFEINQSLKEISDIYQEINF |
| | SKLDEIPINKFNNYVSSCQTAIGGAVSILWELREKSEQVGETKHYSDKYSSTLRMLREFDYACNELRIFINSTTVKLANNPFL |
| | LLEGKAGIGKSHLLADVIKNRIASGYPSLLILGQQLTSDESPWSQIFKRLQLKITSREFLEKLNLYGKKTGKRVLVFIDAINEG |
| | NGNKFWNDNINSFVDEIRCFEWLGLIMSVRTTYRNVTISHENVVRNNFEIHEHIGFQNVELEAVSLFYDYYNIERPSSPNLN |
| | PEFKNPLFLKLLCEGIKKNGLTKVPVGFNGISNIFNFLVEGVNKSLASPKKYAFDPSFPLVKDALNEIIKFKLEIGRNSISLKD |
| | AHSVVQSVVNDYVADKTFLSALIDEGLLTKGIVRNDDNSTEEVVYVAFERFDDHLTVNFLLNDVENIESEFKPDGRLKKYF |
| | HDECDFYIKSGIVEALSIQLPERYEKELYEFLPEFSNNLKLLEAFIDSLIWRDIKAIDFEKIRPFINEHVFKFKDSFDHFLEAVISI |
| | SGLVGHPFNANFLHDWLKDYSLANRDSFWTTELKYKYSEDSAFRHLIDWAWARTDKSFVSDESIELVATSLCWFLTSSNR |
| | ELRDCSTKALVSLLEPRIPVLRKIIDKFYGVNDPYVWERIFAVALGCTLRTDNIKELKYLAETVYQKVFCSKYVYPNILLRD |
| | YAREIIEFANHLGLELESIELSKTRPPYNSIWPDKIPSKEELESLYDKEPYRELWSSIMEDGDFSRYTIGTNYNHSDWSGCKFN |
| | ETPVDRKQVFKTFKCKLTDQQKDLYDATDPFIYDDKCEGIKFGRVVGRKAQEEIKASKKLFKNSLSYDLLSEFENEIEPYLD |
| | HNNNLLETDKHFDLRLAQQFIFNRVIELGWDPEKHGNFDQQIGTGRGRREAFQERIGKKYQWIAYYEYMARLADNFTRFE |
| | GYGDERKENPYQGPWEPYVRDIDPTILLKETGTKKISNKEMWWLNDEVFDWTCSNEDWVKSSTTITNSYAFIEVKDDNGD |
| | EWIVLESHPSWKEPKIIGNDDWGHPRKEVWYQIRSYIVKVEEFENFRCWAIAQDFMGRWMPECTDRYQLFNREYYWSEA |
| | FKSFKSDYYGGSDWTSVTDRESGAKIADVSVTSINYLWEEEFDKSKIETLNFLKPSNLIFEKMGLKSGEVEGSFNDENGTM |
| | VCFAAEAVYASKPHLLVKKEPFLTMLRDNGFEIVWTLLGEKGVIGGSLISSHHYGRQEFSGAFYYEDSQLTGSHKTSFTR* |
| | (SEQ ID NO: 337) |
| 37 | MSDSLLVRTSRDGDQFHYLWAARRALRLLEPQSTLVALTIEGASTTEMGSQPVVEDGEELIDIAEYYGSNELATATTVRYM |
| | QLKHSTMHSDTPFPPSGLQKTIEGFATRYKALIQKIPVETLRTKLEFWFVTNRPVSSSFSEAINDAANQHVTRHPHDLAKLE |
| | KFTGLQGAELSIFCQLLHIEGQQDDLWSQRNILLRESAGYLPDLDTEAPLKLKELVNRKALTESAANPSITRMDVLRALGV |
| | DETDLFPAPCRIERIENSVSRTQEATLVQRVVEAFGAPVIIHADAGVGKSIFSTHIEEHLPTGSVSILYDCFGLGQYRNASSYR |
| | HHHRTALVQMANEMASRGLCHPLIPNAGTGISQYMRAFLHRLSQSISILRASEPLAVLCIIIDAADNAQMAAEEIGETRSFIK |
| | DLIREKLPDGVCLVALCRPYRRELLDPPPEALTLSLQTFNRDETAAHLHQKFPDASESDVDEFHRLSSCNPRVQALSLSQNL |
| | PLNDTLRLLGPNPKTVEDTIGEVLEKSIARLRDTAGISERAQIDTICSALAILRPLIPLSVLSAISGVAGSAIKSFALDLGRPLIV |
| | SGETIQFFDEPAETWFQRRFRPSAADLHQFITKLRPLTKDSSYAASVLPALMLEGNQLSELIELAISSQALPETSAVERRDIEL |
| | QRLQFALKAALRTGRYQDAAKLALKAGGECAGDNRQRVLLRDNIDLAAKFVGSNGVQELVSRNAFPDTGWPGSRNAYY |
| | AAILSEYPELSGEARSRLRLTMEWLTNWSQLPDDERSRQNVTDQDRAVMLIACLNIHGAEAAARELRRWRPRKLSFDAGK |
| | IVAMQLLAHARYDELDQLAIAAGNDISLVMGIVLEARKLHRPVAEQAIRRTWRLLKSQRVSIKDRNHANNQTIAAITGMV |
| | EMALIQSVCTESESIQLLDRYLPKVPPYALTSEYSKERVAYVRAYALQANLMGSQLALSDLASTEVKKELMAEKRHGESD |
| | DLRQLKQYSGVLIPWYNLWAKVILGKTRKADLESELSDTQKESTAIKGHSYSEHSLSSNEIANVWFDILIEAGNVSKDDVE |
| | NIIKWSQHKGNRVFTPTLHRFSSVCAEISGLGELSYHFAELALSLWRDEHSDAQIKADGYIDLSRSLISLDEPEAKEYFNQAI |
| | EVTNKLGDENLSRWEAILDLAEYVAGKTQVPPEISYKLARCAELTREYVDRDKHFAWSDTVEILAELCPSSALAIISRWRD |
| | RTFGNHRSILAWTIEHLVKKNKINALDALPLITFENDWHKCDLLDSVLSSCTDDKDKIMAFEVVYHYTKFNVQNIQNLKKL |
| | DAISTSLGIEHTELKERISGLQHTETVSKKSSLSSNDNEQGHDQEWESIFKDCDLSSIDGISAAYEKFRNVPEFYSKETFIKKAI |
| | SRVKTGKECSFITAIGAIFHWGLYDFKYILESIPDEWTSRLSIKTTLAGLIKEYCQRFCMRIRKSRVYEIFPFSLASRLSGISEKE |
| | IFGITLEAIAESPEPANSDRLFSLPGLLVSKLESNEALDVLSYALDLFDEVLKDEDGDGPWNEKLSPPTHVEDSLAGYIWARL |
| | GSPEAEMRWQAAHAVLALCRMSRTCVIQGIFQHAINATTLPFCDRNLPFYTLHAQLWLMIAAARVALDDGKSLIPNIGYFY |
| | HYATTDQPHVLIRHFAARTLLALHDSDLISIPAQEENKLRNINQSTTLPVLDKVEDHRGEDSYTFGIDFGPYWLKPLGRCFG |
| | VSQKQLEPEMLRIIRDVLGFKGSRNWDEDERNKRRYYQDRDNHHSHGSYPRVDDYHFYLSYHAMFMTAGQLLATKPLV |
| | GSDYDDVEDVFQDWLRRHDISRNDHRWLADRRDIPPKERSSWLNSSSDNRDEWLASISENVFNETLCPSPGLLTLWGRWS |
| | DVCSDRKESIIVHSALVSPERSLSLLRALQTTKNVYDYKIPDAGDNLEIDHAHYQLKGWIKDIAEYCGIDEFDPWAGNVRFP |
| | IPEPASFIIDAMKLTTDKDHRVWYSPSDVEPAMISSIWGHLSGKNDEEKSHGYRLCASIHFIKSALETFNMDLILEVDVDRYS |
| | RNSRYERNNENELDNIPSSTRLFLFRHDGTIHTLYGNYRNGEKTS* (SEQ ID NO: 338) |
| 38 | MAHHIAELIYDAEHCTDDIVRTAKQAEIRDSIWSFWSNRYELPIGSRPFQELEPILRTLKGLDPENEQPRFFSPYRDLINVEKE |
| | TSEVQKWLTAAKDIDSAAKILIDYCLSLAAENAIDKSQEWVELAQKAGLNKDVDLLEIRIFQLRGTPANTDNPNNAQRRIL |
| | EKRQKRLEAFLLLGSQLNEQLKSQLEALPAIEDEPTDDDEDF* (SEQ ID NO: 339) |
| 39 | MVKPNWDNFKAKFSENPQGNFEWFCYLLFCQEFKMPAGIFRYKNQSGIETNPITKDNEHGWQSKFYDTKLSDNKADLIEM |
| | IEKSKKAYPGLSKIIFYTNQEWGQGRKSHEPEGDKNADNYLETVGNSNDPKIKIEVDQKAYESGIEIVWRVASFFESPFVIVE |
| | NEKIAKHFFSLNESIFDLLEEKRKHTENVLYEIQTNIEFKDRSIEIDRRHCIELLHENLVQKKIVIVSGEGGVGKTAVIKKIYEA |
| | EKQYTPFYVFKASEFKKDSINELFGAHGLDDFSNAHQDELRKVIVVDSAEKLLELTNIDPFKEFLTVLIKDKWQVVFTTRN |
| | NYLADLNYAFIDIYKITPGNLVIKNLERGELIELSDNNGFSLPQDVRLLELIKNPFYLSEYLRFYTGESIDYVSFKEKLWNKII |
| | VKNKPSREQCFLATAFQRASEGQFFVSPACDTGILDELVKDGIVGYEAAGYFITHDIYEEWALEKKISVDYIRKANNNEFFE |
| | KIGESLPVRRSFRNWISERLLLDDQSIKPFIAEIVCGEGISNFWKDELWVAVLLSDNSSIFFNYFKRYLLSSDQNLLKRLTFLL |
| | RLACKDVDYDLLKQLGVSNSDLLSIKYVLTKPKGTGWQSVIQFIYENLDEIGIRNINFILPVIQEWNQRNKVGETTRLSSLIA |
| | LKYYQWTIDEDVYLSGRDNEKNILHTILHGAAMIKPEMEEVLVKVLKNRWKEHGTPYFDLMTLILTDLDSYPVWASLPEY |
| | VLQLADLFWYRPLKETGERYHSMDIEDEFGLFRSHHDYYPESPYQTPIYWLLQSQFKKTIDFILDFTNKTTICFAHSHFAKN |
| | EIEEVDVFIEEGKFIKQYICNRLWCSYRGTQVSTYLLSSIHMALEKFFLENFKNADSKVLESWLLFLLRNTKSASISAVVTSIV |
| | LAFPEKTFNVAKVLFQTKDFFRFDMNRMVLDRTHKSSLISLRDGFGGTDYRNSLHEEDRIKACDDVHRNTYLENLALHYQ |
| | IFRSENVTEKDAIERQQVLWDIFDKYYNQLPDEAQETEADKTWRLCLARMDRRKMKITTKEKDEGIEISFNPEIDPKLKQYS |
| | EEAIKKNSEHMKYVTLKLWASYKREKDERYKNYGMYEDNPQIALQETKEIIKKLNEEGGEDFRLLNGNIPADVCSVLLLD |
| | YFNQLNNEEREYCKDIVLAYSKLPLKEGYNYQVQDGTTSAISALPVIYHNYPMERETIKTILLLTLFNDHSIGMAGGRYSVF |
| | PSMVIHKLWLDYFDDMQSLLFGFLILKPKYVILSRKIIHESYRQVDYDIKKININKVFLNNYKHCISNVIDNKISIDDLGSMD |
| | KVDLHILNTAFQLIPVDTVNIEHKKLVSLIVKRFSTSLLSSVREDRVDYALRQSFLERFAYFTLHAPVSDIPDYIKPFLDGFNG |
| | SEPISELFKKFILVEDRLNTYAKFWKVWDLFFDKVVTLCKDGDRYWYVDKIIKSYLFAESPWKENSNGWHTFKDSNSQFF |
| | CDVSRTMGHCPSTLYSLAKSLNNIASCYLNQGITWLSEILSVNKKLWEKKLENDTVYYLECLVRRYINNERERIRRTKQLK |
| | QEVLVILDFLVEKGSVVGYMSRENIL* (SEQ ID NO: 340) |
| 40 | MQVQHHTEPNLKNEIVALFKASQLIPFFGSGFTRDIRAKNGKVPDAIKFTELIRNIAAEKEGLTQTEIDEILRISQLKKAFGLL |
| | NMEEYIPKRKSKALLGNIFSECKLSDHEKTKIINLDWPHIFTFNIDDAIENVNRKYKILHPNRAVQREFISANKCLFKIHGDIT |
| | EFIKYEDQNLIFTWREYAHSIEENKSMLSFLSEEAKNSAFLFIGCSLDGELDLMHLSRSTPFKKSIYLKKGYLNLEEKIALSEY |
| | GIEKVITFDTYDQIYQWLNNTLQNVERKSPTRSFELDDSKLMKEEAINLFANGGPVTKIVDNKRILRNSITFSQRDVCDDAIK |
| | ALRNHDYILITGRRFSGKSVLLFQIIEAKKEYNASYYSSTDTFDPSIKNSLIKFENHIFVFDSNFFNAQSIDEILTTRVHPSNKV |
| | VLCSSFGDAELYRFKLKDKKILHTEIQIKNNLINEEGNYLNDKLSFEGLPLYKSSETLLNFAYRYYSEYKNRLSGSNLFNKQ |
| | FDEDSMFVLILIAAFNKATYGHINSHNKYFDIQNFISQNDRLFELESTNTDPSGVIICNSPSWLLRVISEYIDKNPASYKTVSD |
| | LHSLASKGFLAASRNLISFDKLNELGNGKNVHKFIRGIYKEIAHTYREDMHYWLQRAKSELISAHTIDDLVEGMSYASKVR |
| | LDSAEFKNQTYYSATLVLAQLSARALSINNDKIYALSFFESSLESIRNYNNNSRHINKMMDKNDGGFRYAIQYLKDNPLIEL |
| | LPRKDEVNELINFYESRKK* (SEQ ID NO: 341) |
| 41 | MQFITNGPDIPDELLQAHEEGRVVFFCGAGISYPAGLPGFKGLVELIYQRNGTTLSEIEREVFERGQFDGTLDLLERRLPGQR |
| | IAVRRALEKALKPKLRRRGAIDTQAALLRLARSREGALRLVTTNFDRLFHVAAKRTGQAFQAYVAPMLPIPKNSRWDGLV |
| | YLHGLLPEKADDTALNRLVVTSGDFGLAYLTERWAARFVSELFRNYVVCFVGYSINDPVLRYMMDALAADRRLGEVTPQ |
| | VWALGECEPGQEHRKAIEWEAKGVTPILYTVPAGSTDHSVLHQTLHAWADTYRDGIQGKKAIVVKHALARPQDSTRQDD |
| | FVGRMLWALSDKSGLPAKRFAELNPAPPLDWLLKAFSDERFKYSDLPRFCVSPHVEIDPKLRFSLVQRPAPYELAPQMSLV |
| | SGCVSASKWDDVMSHIARWLVRYLGDPRLIIWIAERGGQIHDRWMFLIESELDRLAALMRERKTSELDEILLHSPLAIPGPP |
| | MSTLWRLLLSGRVKSPLQNLDLYRWQNRLKNEGLTTTLRLELRGLLSPKVMLRRPFRYSEDDSSSTDEPLRIKQLVDWEL |
| | VLTADYVRSTLFDLADESWKSSLPYLLEDFQQLLRDALDLLRELGESDDRHDRSHWDLPSITPHWQNRGFRDWVSLIELLR |
| | DSWLAVRAKDSDQASRIAQNWFELPYPTFKRLALFAASQDNCIPPERWVNWLLEDGSWWLWATDTRREVFRLFVLQGR |
| | HLTGIAQERLETAILAGPPREMYEDNLEADRWHYLVAHSVWLCLAKLRGAGLVLGESAATRLTEISTAYPKWQLATNERD |
| | EFSHWMSGTGDPGFEESIDVDIAPRKWQELVQWLAKPMPERLPFYEDTWSDVCRTRFFHSLYALRKLSQDDVWPVGRWR |
| | EALQTWAEPGMILRSWRYAAPLVLDMPDAVLQEISHAVTWWMEEASKTILCHEEILLALCRRVLMIETSPESSTIRNGIETY |
| | DPVSTAINHPIGHVTQSLITLWFKQNPNDNDLLPVELKTLFTKLCNVQIELFRHGRVLLGSRLIAFFRVDRPWTEQYLLPLFA |
| | WSNPVEAKAVWEGFLWSPRLYEPLLIAFKSDFLESANHYSDLGEHRQQFAIFLTYAALGPTEGYTVEEFRTAISALPQEGLE |
| | VAAQALYQALEGAGDQREEYWKNRVQPFWQQVWPKSRNLATPRISESLTRMVIAARGEFPAALAVVQDWLQPLEHLSY |
| | DVRLLLESDICSRYPADALSLLNAVIAEQHWGPRELGQCLLQIVQAAPQLEQDVRYQRLNEYSRRRSV* (SEQ ID NO: 342) |
| 42 | MTNKNKIKPLLNNISARLWDGRAAILIGAGFSRNAKPLTSKARKFPMWNDLGDIFYESVYCKKNDNRYSNVLKLGDEVQA |
| | AFGRATLDKLIMDHVPDKEYEPSKLHVSLLSLPWIDVFTTNYDTLLERASVNVDSRKYDIVLNKNDLMNAERPRIIKLHGS |
| | FPSERPFIVTEEDYRKYPLENSPFVNTVQQSLIENTLCLIGFSGDDPNFLNWIGWIRDNLGTENSPKIYLIGLFSFNEAQRKLL |
| | EKRNISIVDLSFLGDFGKDHYLAHQRFIQFLYESKNRDNLIEWPIETNYDRIVFNDGIELKTEKIKKCILEWAQSRQSYPNWL |
| | ILPESNRSNLWQNTIDWLSVANYDVAWDGSDDLDFGYEITWRLNKALLPIFNDTSEFLFKLIEKYEINYVSGINNKIIDFDEK |
| | YSHITLSLMRFCRQENLIDKWKNLNDLLIQNLDRLTPEVKSDYYYENILFSYFNLNFDEARNKLSNWETNKLLPHHEIKRA |
| | GLLAEFGMLDEAINLLEETLSTIRRNSLLSSRNIDYSSESQEAYGIYILRMFKRSLRLDSKDDDYSSEYNSRLATLSQYRSDPE |
| | NEIKYLEIKLESLPGTFKNTNDTDFDLNKRTVTTYLGGSPTEVRSLDAFSFFLLAEELGLPFHIPGMNIFSGIVENAARHIYQY |
| | SPEWAIFSIFRTFNKDKAKSLFNRNRISSLERKKVEDLFDGYYKKYEQIITKKIEDRLNDKLEIEISTLSIIPEILSRLVTKVSFN |
| | KKKDIIHLLLKLFNSDNFHQYMETKDLLKRTISNLSDLQKISLIDIFIDFPSAPPNTQLHMGQRYNFLTPFECLLGVTITPPKEN |
| | SKKIASAKLKKDINDLKSDNLDLRKAVSQKLITLYNLEMLNKSDTTKLIKNLWSKRDNFGFPIGSGYYKFFFINNLNPDNEN |
| | IADKFISIIKTYKFPVQEGKRVSITGGLDEYCTELNGALHHISLPEKTLSEIISKIHDWYVKDRAWLEKRDDLAKEFTLRFRNI |
| | TNIITTILEHHKDKLHAESINEISSLLDKMKEDKIPVNSAVTMLCLKNKSTYLERIKDIENGLYSFNKDDVIEAINSTYVFIRN |
| | NEFPLTIIQAISDKIAWDRNPRLPDCYNLIAYIINSCEFTLPDYLIEKILRGLAYQINIDDRDFVDNNEYLNHLEKKLSATKLA |
| | ASMFRKNETLGIDQPSIIQEWKNMCNSRNEFDEIRNEWNNNI* (SEQ ID NO: 343) |
| 43 | MSIYQGGNKLNEDDFRSHVYSLCQLDNVGVLLGAGASVGCGGKTMKDVWKSFKQNYPELLGALIDKYLLVSQIDSDNNL |
| | VNVELLIDEATKFLSVAKTRRCEDEEEEFRKILSSLYKEVTKAALLTGEQFREKNQGKKDAFKYHKELISKLISNRQPGQSA |
| | PAIFTTNYDLALEWAAEDLGIQLFNGFSGLHTRQFYPQNFDLAFRNVNAKGEARFGHYHAYLYKLHGSLTWYQNDSLTV |
| | NEVSASQAYDEYINDIINKDDFYRGQHLIYPGANKYSHTIGFVYGEMFRRFGEFISKPQTALFINGFGFGDYHINRIILGALLN |
| | PSFHVVIYYPELKEAITKVSKGGGSEAEKAIVTLKNMAFNQVTVVGGGSKAYFNSFVEHLPYPVLFPRDNIVDELVEAIANL |
| | SKGEGNVPF* (SEQ ID NO: 344) |
| 44 | MSLFKLTEISAIGYVVGLEGERIRINLHEGLQGRLASHRKGVSSVTQPGDLIGFDAGNILVVARVTDMAFVEADKAHKANV |
| | GTSDLADIPLRQIIAYAIGFVKRELNGYVFISEDWRLPALGSSAVPLTSDFLNIIYSIDKEELPKAVELGVDSRTKTVKIFASV |
| | DKLLSRHLAVLGSTGYGKSNFNALLTRKVSEKYPNSRIVIFDINGEYAQAFTGIPNVKHTILGESPNVDSLEKKQQKGELYS |
| | EEYYCYKKIPYQALGFAGLIKLLRPSDKTQLPALRNALSAINRTHFKSRNIYLEKDDGETFLLYDDCRDTNQSKLAEWLDL |
| | LRRRRLKRTNVWPPFKSLATLVAEFGCVAADRSNGSKRDAFGFSNVLPLVKIIQQLAEDIRFKSIVNLNGGGELADGGTHW |
| | DKAMSDEVDYFFGKEKGQENDWNVHIVNMKNLAQDHAPMLLSALLEMFAEILFRRGQERSYPTVLLLEEAHHYLRDPYA |
| | EIDSQIKAYERLAKEGRKFKCSLIVSTQRPSELSPTVLAMCSNWFSLRLTNERDLQALRYAMESGNEQILKQISGLPRGDAV |
| | AFGSAFNLPVRISINQARPGPKSSDAVFSEEWANCTELRC* (SEQ ID NO: 345) |
| 45 | MDRSAVDTIRGYCYQVDKTIIEIFSLPQMDDSIDIECIEDVDVYNDGHLTAIQCKYYESTDYNHSVISKPIRLMLSHFKDNKE |
| | KGANYYLYGHYKSGQEKLTLPLKVDFFKSNFLTYTEKKIKHEYHIENGLTEEDLQAFLDRLVININAKSFDDQKKETIQIIK |
| | NHFQCEDYEAEHYLYSNAFRKTYDISCNKKDRRIKKSDFVESINKSKVLFNIWFYQYEGRKEYLRKLKESFIRRSVNTSPYA |
| | RFFILEFQDKTDIKTVKDCIYKIQSNWSNLSKRTDRPYSPFLLFHGTSDANLYELKNQLFNEDLIFTDGYPFKGSVFTPKMLI |
| | EGFSNKEIHFQFINDIDDFNETLNSINIRKEVYQFYTENCLDIPSQLPQVNIQVKDFADIKEIV* (SEQ ID NO: 346) |
| 46 | MSRNNDINAEVVSVSPNKLKISVDDLEEFKIAEEKLGVGSYLRVSDNQDVALLAIIDNFSIEVKESQKQKYMIEASPIGLVK |
| | NGKFYRGGDSLALPPKKVEPAKLDEIISIYSDSIDINDRFTFSSLSLNTKVSVPVNGNRFFNKHIAIVGSTGSGKSHTVAKILQ |
| | KAVDEKQEGYKGLNNSHIIIFDIHSEYENAFPNSNVLNVDTLTLPYWLLNGDELEELFLDTEANDHNQRNVFRQAITLNKKI |
| | HFQGDPATKEIISFHSPYYFDINEVINYINNRNNERKNKDNEHIWSDEEGNFKFDNENAHRLFKENVTPDGSSAGALNGKLL |
| | NFVDRLQSKIFDKRLDFILGEGSKSVTFKETLETLISYGKDKSNITILDVSGVPFEVLSICVSLISRLIFEFGYHSKKIKRKSNEN |
| | QDIPILIVYEEAHKYAPKSDLSKYRTSKEAIERIAKEGRKYGVTLLLASQRPSEISETIFSQCNTFISMRLTNPDDQNYVKRLL |
| | PDTVGDITNLLPSLKEGEALIMGDSISIPSIVKIEKCTIPPSSIDIKYLDEWRKEWVDSEFDKIIEQWSKS* (SEQ ID |
| | NO: 347) |
| 47 | MIMSTPWLTPIVADSDHAEANAVSYEALTPTELDSDKAGCYISALNYAYEHPDIRNIAVTGPYGAGKSSVLKTWCKAHNG |
| | TLRVLTVSLADFDMQRHVDESNGDSSSDEGTKNTGSVEKSIEYSILQQILYKNKKHELPCSRIDRISDVTAGQILRSASFLTG |
| | TILLSGAALFFLAPDYVTTKLSLPGAFARYLLECPFGVRVSGAVASVMGSLCLLLNQLHRIGIFDRKVSLDKVDLLKGAVTT |
| | RASSPSLLNVYIDEIVYFFDSTKYDVVIFEDLDRFNNGRIFVKLREINQIINNCLSDRKPVKFIYAVRDGIFNSAESRTKFFDFV |
| | MPVIPVMDNQNAYEHFVKKFKEEEINNNLSECISRIATFIPNMRVMHNITNEFRLYQNLVNSRENLAKLLAMIAYKNLCAE |
| | DYHGIDSKKGVLYHFIQSYLDHEIQNELLHSANNELEDMAQSLVAITNEKLANRENLREELLMPYLSKNYSGALVFYTEGR |
| | QISLDDLIQDEDEFLMLLDKENIQVVTPYNRQNFLMINQRDTEKLKQQYEKRCHLIETKSVDNITRVKNNISSLESLRTEILS |
| | GTVADIAEKMTNEGFVAWIKKKEDTGVLTIQSEHEQIDFIFFLLSSGYLSTDYMSYRSIFIPGGLSETDNLFLKDVMSGKGPE |
| | KTFSFHLDNVNNIVERLKKLGVLQRDNAQHPAVIRWLIDNDPDTLKNNIMALLSQTGSQRVVSLLMLMQNDFTTYVRLRY |
| | LEIFMSDEHILNRLLAHLCASEERTPEQKFFVQEIAAHLLCLTEKSNIWQSVEINKRIGELIDSSPILITAVPKGYGDAFFEVLK |
| | DNTLSVSYIPGDVGDEKCSVIRKIAGAGLFKYSVSNLKNVYLCLTQDKNEERMSFSLYPFHCLESLAISELTEILWTNIEDFIL |
| | SVFIESEEIDRIPELLNSSEVSMTVVEQIIAKMDFCINNLDDIINRSECADNNASGRNIYSMLLQHDRIFPSFDNIIHLLHDTSIN |
| | TSGELVQWVNEKHFEFEPSDIVINDTGIFNNFISELICSPVISEEALLKVLSNLNVVIIDVPENIPLRNAELLCSEKKLAPTVNV |
| | FTVLFNALSENVDDINRMNTLLGNLIAQRPEIITQEPEDIFYIEGDFDEELASELFRHKLIGMNIKVAALRWLRDNKPGILDKS |
| | YLLSLDILAELSPWMGDDDLRLTLLKRCLVAGDAGKDALCVVLNSFADESYHGLLPHDRFRKIPHSVDLWEVAELISNLGF |
| | IQPPKMGSGRDEHKIVITPVRYVRDVEFYD* (SEQ ID NO: 348) |
| 48 | MFLNDQETSTDLLYYTAIASTVVRLVDETSDAPITIGVHGDWGAGKSSVLKMLEAACEKKDKTHCIWFNGWTFEGFEDAK |
| | TVIIETIVEDLVASRPMSTKVAEAAKKVLRRIDWLKMAKKAGGLAFTAFTGIPTFDQIKGMYELASDFLSAPQDKLSAADF |
| | KAFAEKAGGFIKEADTDSNTLPKHIHAFREEFRALLDAAEIEKLVVIVDDLDRCLPKTAIETLEAIRLFLFVEKTAFVIGADE |
| | AMIEYAVKDHFPDLPQSTGPVSYARNYLEKLIQVPFRIPALGTAETRIYTTLLLAENALGSEDDNFKALLNKAREEMKRPWI |
| | SRGLDREAVMAALNGKIPEVVENALLFSLHVTPMLSSGTHGNPRQIKRFLNSMMLRQAIADERGFGSDIKRPVLAKIMLAE |
| | RFYPSVYGKLVQLVSNHPEGKPEALAEFEALVRGGKTAPKSRADSKENSSESEDVQNWLKIDWAIGWAKAEPALSGEDLR |
| | PYVFVTRDKHSTLSNLVVSSHLIPIMEKLLGPKIGMVKIKGDLEKLSPPDADELFEMLSDKLFQEDSFNRKPRGFDGLEYLV |
| | ETQPHLQRRLIDFARRIPVKKAGGWLATRIAQSLVDPTLIEEYTKLIQEWASQDENLSLSKSAKATLQLSGYQH* (SEQ ID |
| | NO: 349) |
| 49 | MGTSKAYGGPVHGLIPDFVENPSPPTLPPVDPADDSTLDTPLIPPDSSGSGPLSTPKANFTRYSRSGSRSSLGKAVAGYVRNG |
| | VGGAGRASRRMGASRAAAGGLLGLISDYQQGGATQALERFNLGNLAGQSASTALLSLVEFLCPPGGSVDEGVARQAMLE |
| | TIADMSDVGEENFDELTPDQLKEVFIGFVVHSIEGRLMADIGKNGIKLPDDIDAIVSIQEDLHDFVDGATRTQLREELRNLTG |
| | LSGDAIDRKVEEIYTVAFELLAREGERLE* (SEQ ID NO: 350) |
| 50 | MSHHTLVARLGTDDNSDLQLSRQSTHLTEINFLKENGKLDFGLGQALNGLSDLGLTPMDVSVDLALLAATVTAADTRISR |
| | GHNAQDLWTREIALYIPVASPTLWNSQTGLLSRMLNFLTGDRWTIHFRSRPVIEHGLIQRSSKERSVNPTSVCLFSGGLDSFI |
| | GAIDLLSNGGTPLLISHYWDTTTSVYQQKCAQLLSERYGQSFSHVRARVGFEKTTIEGEDGENTLRGRSFMFFSLATMAAD |
| | ALGGPVTINVPENGLISLNVPLDPLRVGALSTRTTHPFYMARFNELLGNLGISAHLENPYAYKTKGEMAIHCHDHAFLRQH |
| | AADTMSCSSPQSTRWNPALNEQQSTHCGRCVPCLIRRASLFTAFGTDDTIYRIPDLRSRVLDSSKPEGEHVRAFQFALARLA |
| | RSPSRAKFDIHKPGPLSDYPDCLAEYEGVYLRGMKEVERLLSGVITRPLT* (SEQ ID NO: 351) |
| 51 | MKLAGQKPAPQWVDFHCHLDLYPNHSALIRECDISRVATLAVTTTPKAWMRNRELTSDSPYVRVALGLHPQLIAEREHEI |
| | ALLEHYLPSARYVGEIGLDASPRFYRSFEAQERIFSRILNACFEQGDKILSIHSVRAAAKVLGHLENTRLTENCKAVLHWFT |
| | GSISEARRAVELGCYFSINEEMLRSPKHRKLVSFLPFERILTETDGPFVFHEEKAIHPRDVQRTVHEIAQIHHVSDTDAAMRIL |
| | YNLRSLVTNSSHSENSS* (SEQ ID NO: 352) |
| 52 | MSTVDTSTAEELNQGGSDFILTSLEAMRKKLLDLTSRNRLLNFPITQKGSSLRIVDELPEQLYETLCSEIPMEFAPVPDPTRA |
| | QLLEHGYLKVGPDGKDIQLRAHPSAKDWAHVLGIRTDFDLPDSHKTVVSDSDRELLEKAHQFILQYAQGQNGKLTGIRSE |
| | YVNQGIALSALKEACCLAGYEGLEDFERQAKAGNEISISSSNPSHDDNRIQALLYPNELEACLRAIYGKAQTALEESGANIL |
| | YLALGFLEWYESDSSEKARYAPLFTIPVRCERGKLDPKDGLYKFQLYYTGEDILPNLSLKEKLQADFGLALPLFNEEETPES |
| | YFASVKKVVEQHKPKWSVKRYGALSLLNFGKMMMYLDLDPARWPCDKRNILSHEVIRRFFTSQSCGQENSGLPGGFGQH |
| | EYCIDSYPDIHDKVPLIDDADSSQHSALIDAIRGQNLVIEGPPGSGKSQTITNLIAAALLNGKKVLFVAEKMAALEVVKRRL |
| | DRAGLGQFCLELHSHKTHKRKVLDDINARLVSQATMPTMEEIDAQILRYEDLKQQLNEYAALINNQWAQTGKTIHQILSG |
| | ATRYRHKLDIDATALHIENLSGKQLDKVTQLRLRDQIVEFSRIYKEVREQVGANAEIYEHPWSGVNNTQIQLFDSARIVDLL |
| | QTWQTSIIDFQHSYQEYVDKWALEGESLNTLQYIEQLVEDQSNLPVLCGSEHFPALSELDSPDAIARVRHYLDRFELLQGH |
| | YVALSQVIEPQKLRLLEQGQSCDFPREELEKYGAAEDFTLRDLVRWLESIQSIHDELSSIYAQLNDFKNALPDGIASYIDDSQ |
| | AGLLFCSELLSILGALPTELIRVRDPLFDDDDIDAVLRDLMCQIETLRPLRDGLSTLYQLDQLPSQEMLAHAVAVIQQGGLF |
| | AWFKSDWRSAKALLMAQSRKPDTKFAELKRCSADLLKYSELLQRFEQSDFGNQLGNAFRGLDTDCEQLMLLRDWYKKV |
| | RACYGIGFGKRVAIGSGLFNLDGEIIKGVHLIEKSQISSRLMTLVKRVEHEAKLLPRISSLLEEHASWLGEQGVLMQSYRQV |
| | RNTLIALQGWFINPDISLEQMTHSSEILQNINDLQISLENDSLQLGAFLQLTPLACGAYKNNQLTLDTINDTLNFAEQLVDKI |
| | NCVSLATQIRHLASGSDYDLLCRDGGEIVSKWNEQIKNAELYALETKLERSQWLKSTDGSLNTLIERNERAIQQPRWLNG |
| | WVNFIRCYEQMHENGLQRIWSAVLAGSLPIEKVELGLALAIHDQLAREVIHIHPELMRVSGSQRNALQKSFKEYDKKLIEL |
| | QRQRIAAKIACRNIPEGNSGGKKSEYTELALIKNELGKKTRHIPIRQLVNRACNALVAIKPCFMMGPMSAAHYLEPGRMEF |
| | DLVVMDEASQVKPEDALGVIARGKQLVVVGDPKQLPPTSFFDRSADGEDDDDAAALSDTDSILDAALPLFPMRRLRWHY |
| | RSRHEKLIAYSNRHFYNSDLVIFPSPNAESPEYGIKFTYVSKGRFSNQHNIEEAQAVAEAVLHHAHHRPGESLGVVAMSSK |
| | QRDQIERAIDELRRNRPEFNDAIDGLHAMEEPLFVKNLENVQGDERDVIFISFTYGPSEHGGKVYQRFGPINSDVGWRRLN |
| | VLFTRSKKRMHVFSSMRSEDVLTSETSKLGVISLKGFLQFAESGKLDSLTTHTGRAPDSDFEVAVMEALNHAGFECEPQVG |
| | VAGFFIDLAVKDPGCPGRYLMGIECDGAAYHSAKSARDRDRLRQEVLERLGWRISRIWSTDWFSNPDEVLSPIIRKLHELK |
| | TLAPDVVVPSYEYVETIESSAEVASDSIDSLMPNLGLKEQLKYFATHVIEVELPNVDADRRLLRPAMLEALLEHQPLSRSEF |
| | VERIPHYLRQATDVYEAQRFLDRVLALIDGAEAEANDAAFESELA* (SEQ ID NO: 353) |
| 53 | MHRTISEFYRIPPLLIRALKSGISSVVEFHLNRGLPKDSRDSLGNSPLMIAAQYGHFAICEMLLSAGVDVEHQNNLGLRASDL |
| | AQEQKLRDLLARYRQPLSLAELERSVVSVEDSETEAELPSAEIPMDFMLWDAEVELKPAEDNLTLRHASAEAQQLLSRYRP |
| | KDNSAEWSDIELTLPEPLTPVSHSPQNYPHLSTLLIGALDTGRISLRDIWHAGEEDFGMQWPEFRLSVEALIRDLPLIVDDDD |
| | IIPPDAAPATLSVSEPLEPWFDAFNALRQFGIVENYLVDIRQWDVVDKTKEERLGQRMDTALINLIRILAGLSEAEYMQLLQ |
| | PNYLPEPAPEISEEEDVAEEADEEMPPVSDDDDDNDDTISFIELLVLLRSGKAGEYQDNHIPRPEYADLQQIVERARTLIPDE |
| | GHKISLYVSSYREAWEGLIHANLRLVVTIANKYRGRGLDVEDLIQEGNLGLIKAVEKFDYRRGFKFSTYATWWIRQKISRA |
| | IADQAQLIRLPVHFYEQFRRWRNSRDQLLYRQGITPTIKRLQALTDLPENQLKRMAKYEEQTVLIGDFHDDAQDSEAALSG |
| | DAILTGKDFTSAPVQSLELRECVSLVLETLLPREKQIIKMRFGIGMTQDFTLEEVGKQFDVTRERIRQIEAKALRKLRYHSRA |
| | SKLGGFVEQWETALSEMQEEEE* (SEQ ID NO: 354) |
| 54 | MTTMRHAPPNAAIMIEALRGLGYNTATALADIIDNSISAGARKVDLTFHWRESDSYIVVRDNGCGMSAAELDVAMRLGV |
| | KNPLTKRSGHDLGRFGLGLKTASFSQCRRLTVASKKEEITTILRWDLDILAASTDDGWYLLEGADPGSQEALANEEPDSHG |
| | TVVLWDVLDRIVTPGYGEKDFLNLMDGVEQHLAMVFHRFLEGNAPRLTLTLNGRKIKAWDPFLSGHPSKPWHSPSAMAP |
| | GAPAVKVECHVLPHQDHLTTQEYQQAQGPAGWTAQQGFYVYRNERLLVAGNWLGLGSPRAWTKDETHRLARIRLDIPN |
| | DADIDWKIDIRKSMARPPVSLRPWLTQLAQSTRDRAVRTFAKRGKMNKRKPGEELVQLWQAQKTPSGVRYQISLQHPVIS |
| | NVLSQAGELSPQIQAMLRLIEETVPVQQIWLDTAETKETPRTGFETAPPAEVLSVLQVMYQTMVGQQAMSPALAKQHLQN |
| | MEPFDNYPELIALLPDDQHEKSL* (SEQ ID NO: 355) |
| 55 | MSLNPLDDTQLSVLQIVQTFLQSQDKSTITPGILRQHIDMVCQMKPEWSRLDSREILVEELIRRYSIWMGEDSSLSNDEGHQ |
| | PWLTADAKREWRYWHRYRQWLGKTMPWGVLDTLDRSTDRVLGLLEQPGREGRWDRRGLVVGHVQSGKTSHYTGLICK |
| | AADAGYKIIIVLAGLHNNLRSQTQMRLDEGFLGYETSPLREKVTIIGVGAIDSDPVIRPNYVTNRSEKGDFSAGVAKNLGISP |
| | EQRPWLFVVKKNKSILKRLHTWIENHVATSVDPITGKRFVSELPLLMIDDEADNASVDTGEIVYDDDGKPDAEHQPTAINS |
| | LIRKLLMQFSRKAYVGYTATPFANIFIHESNETRDEGPDLFPSAFIINLGAPSNYIGPARVFGRATAEGRSGEFPLIRRVSDHC |
| | SDDGKRGWMPVSHKSSHYPTLDTLTHFPDSLKHAIDSFLLACCVRELRGQGEKHSSMLVHVTRFNKVQSVVYENIDAYIQ |
| | DVRQRLTRRIGHEPFLHQLESLWQADFLPTNQAIREVMPQQVPDDAFEWQEIVDKLYTVIENVSVRMINGTAKDALDYSD |
| | SATGLKVIAIGGDKLARGLTLEGLCTSYFLRASRMYDTLMQMGRWFGYRQGYLDVCRLYTTDELIEWFEHIADASEELRE |
| | EFDNMVASGGTPRDFGLKVKSHPVLMVTSPLKMRSARSLWLSFSGTVVETISLFKEQEYHKRNYVAFQRLTGRVGAGAPI |
| | PERRRGDKIEKWNGVIWQNISPEPIIDFLTEYETHAQARKANSKLLADFVTRMNRVDELTQWTVAVIGGGIDRHHDVCGFS |
| | VPLMMRKASEGVTDRYSIGRLLSPRDEGIDCDESTWLAALEETQRIFHADPGRNEGREEPVVPGGVVLRRIKGFGINDIPAQ |
| | RQKGLLLIYLLDPQQALSAAEYQEDALPVVAFGISFPGSRSGVTVEYKVNNVLWEQEYGAAE* (SEQ ID NO: 356) |
| 56 | MVRLSKDDLLAAWKALDRSQIDELPGAQGWRGIRLFTHQGCSFHAGRRQPDNEEMLIAVFPHPLSPGSAALPSCKGFRVE |
| | MAGTEEGGQNGLMIRRQQTGNVDVFTTMILDILHSLLNVSKPRLFETLLRRIRLWQAFMERDTRPLSQEEEVGLIGELTCLE |
| | RLIESGLAPSTAVEAWIGPQHGLQDFALDERAIEIKSTTAAKGFCITIHSLEQLDWQRAGSLVLCGLRFSEHPTGATLNDIISR |
| | LRQRFEGNATAACIFEGSLCHVGYFTEHAEFYTRHFLLTEAFALPIEADFPSLTHANVPLPVVSARYQLELQTLIPQAQDFN |
| | HCLSDFAGLPHGNY* (SEQ ID NO: 357) |
| 57 | MEIIDFLRQTQNEIRKEYQDQMAQPGVESPFPELIFTDIVMRHMADIGMTFDDAETCHFMAKVSGHNVRLSGYAFSEDGDQ |
| | LDLFVSIYHGSDELCHVPDAETKAIAGHCIQFLQKCVDGKLSSTLDQSNDAWQLVTTIEQSYAELEQIRIYVLTDGQVKTR |
| | WYQSRDVAGKTIKLEVMDIVRLFNHWQEGKPRDELQVNFDEVAGGALPCVWIPDEMGEYDYALTVVPGETLRFIYEKYG |
| | NRILEANVRSFLSQTGKVNKGIRDTLREQPERFMAYNNGIVIVADQVRLGEAPGGGPGIAWMQGMQIVNGGQTTASMFFT |
| | KKKFPATNLRNVRVPAKVIVLKQTNNAQEEMLIADISRFSNSQNKVNISDLSANRPVHVQLEKMANTVYCPDGYSRWFYE |
| | RANGSYKVMLEREGKTPAGIKRLKDAIPPSRRITKTDFAKYHCAWLQRPDLVSLGGQKNFAALMTMIDKDTERYGDELNI |
| | ETFKNYIAQAIIYKKAYKLINSLFPAFKANIAAYTVAAYSHLYGNKTDLAEIWNQQGIEETMGNRLVSLAHRVNSLLTESA |
| | NGRMISEWAKKPECWDYVRSKIYFSAQGKKDDFSHGEIA* (SEQ ID NO: 358) |
| 58 | MAYEAQISRTNPAAFLFVVDQSGSMSDKMSSGRSKAEFVADALNRTLMNLITRCTKSEGVRDYFEIGVLGYGGQGVSNGF |
| | SGSLGGQVLNPISALEQNPARVEDRKRKMDDGAGGIIETAIKFPVWFDPIASGGTPMREALTRAAEELVTWCDAHPDCYPP |
| | TILHVTDGESNDGDPEEIANHLRQIRTNDGEVLILNIHVSSLGNDPIRFPSSDTGLPDAYAKLLFRMSSPLPEHLVRFAQEKG |
| | HTVGIESRGFMFNAEAAELVDFFDIGTRASQLR* (SEQ ID NO: 359) |
| 59 | MKLEFLGTVPKDPEYPKANEDKFAFSEDGRRLALCDGASESFNSKLWADLLARKFTADPKVNPEWVASALAEYSATHDFP |
| | SMSWSQQAAFERGSFATLIGVEEFEEHQAVEILAIGDSITMLVDCGKLICAWPFDNPEKFNERPTLLATLYAHNNFVGGSTF |
| | WTRHGKTFYLEKLTQPKLLCMTDALGEWALKQALAEDSGFIELLSLQTEEELAELVLRERAAKRMHIDDSTLLVLSF* |
| | (SEQ ID NO: 360) |
| 60 | MPYPSLEQYNQAFQLHSKLLIDPELKSGTVATTGLGLPLAISGGFALTYTIKSGAKKYAVRCFHRESKALERRYEAISRKISS |
| | LRSPYFLDFQFQPQGVKVEGISYPIVKMAWAKGETLGEFLEVNRRSAQAIAKLSASIESLAAYLEKEKIAHGDFQTGNLMV |
| | SDGGATVQLIDYDGMFVDEIKTLGSSELGHVNFQHPRRKATNPFNHTLDRFSLISLWLALKALQIDPSIWDKSNSELDAIIFR |
| | ANDFVDPGSSSILGMLSGIQQLSTHVKNFAAVCASAMEKTPSLGDFIASKNIPISLASISMNGDIPVSRLKPGYIGAYTVLSAL |
| | DYSACLQRVGDKVEVIGKIIDVKLNKTRNGKPYIFVNFGDWRGNIFKISIWSEGISALPSKPDASWIGKWISVIGLMEPPYVS |
| | GKYKYSHISITVTTIGQMTVLSEPDARWRLAGPNESRQTLTSTSSNQEALERIKSKSTTSTPMPMNTNATTANQAILNKLRA |
| | STQTVAAARAQTQHVVPNKSSTHYVAPTGTSASQPVQNIPSPASTSKQQTSQKNIVTKILKWLFG* (SEQ ID NO: 361) |
| 61 | MNEHLSHMDVHTLFEEMDEQADGITFKYSFDDIAKSNALVVTEFVNFERDSTVALLASLLTLPAHQSQCLRFELLTSLALIH |
| | CKGQQIANIDDVKRWYVTIGESSSIVGEDPAEDVFVALVDNKKGDYRVLEGVWEAAGFYTQLMVEIVSDMPDTHRYRSL |
| | KLAIQAILRLSDVICARSGLYRFQEGADEFPDSLDTAGLDEKTLCSRVTLSERSLRAEGIKLADLAPFILEPSHISMLGNQVPG |
| | EGMLEQRPLLRTRDGIVVVLPTAMTIALRQAVITFAKRTEELSELDKALANVYSLTFSEMPVFGNGGRLRRLTWEKYKMS |
| | RTTMVTSIVDAGHLMVLQFVLPSIQQYADTGFNNLLQLDEETTQFLDNSVEQITVDLAKQPGFQRGIVVRIACGWGAGFM |
| | GVPPQLPDGWGFEWMSGADFVRFGALPDMSPIAFWRVQDAVETIRQAGVRLINMSGTLNLLGWIRANDGHMVPHDQLP |
| | DDRITPEHPLMLMIPTNLLRGIRIAADTGYDRHRISDNNGKWHRVMRPSAEDFFPTERQSKCYASIDDLEAQRLTCVYEGQ |
| | GNLWVTLEAPEMEDWMLLVELAKMVRTWIGRIGEALEVLSEQPIKKSLKVYLHFDGNDNIGRFDGENFSDDMNTFWRLE |
| | RIHEHGAIRVVLQDGYLAGFRLPDNRAERALVRALGTAFATLLRMKEPVDKGVTVEQIAVPNDRARSFHIMQAYDFNQYL |
| | GRSLTKRLLAIEDIDSAAARIELAWRAVSTDAPSRYQGKKEVGKLLNDVVDVLIQDLLSELSRFDRKQTVMRLLENVVKA |
| | RCEEAHWRSTAAAVLGLHAGEEGVEETIAQEMSRYAGAALTSRLIIELAICVCPTSGGIEPSDMALSKLLARASLLFRIGGM |
| | SDAVRFGALPADIRISPLGDLLFRDELGKMVLEPMLSKVTNERFEEQAAQFEQHYVKTAGGDDENSKQDSVAAETTEDQT |
| | DIFLAFWKAEMGFTLEDGMRFIQFLESIGIEQESAIFEMRRSQLADAAKSAGLADETIDAFLNQFILSARPKWDVVPDGFDL |
| | SDIYPWRFGRRLSVAVRPLLQIEESHDPLIVIAPGLLNLSLKYVFDGAYTGQFKRDFFRTEGMRDTWLGGAREGHTFEKTLE |
| | RELREIGWTVRRGIGFPEILRRNLPGDPGDIDLLAWRSDRNQVLVIECKDLSLARNYSEVASQLSEYQGDDIKGKPDKLKK |
| | HLKRVLLAKENIDNFAKFTSIANPEIVSWLVFSGASPIAYAQSKIEALAGTNVGRPSDLLNF* (SEQ ID NO: 362) |
| 62 | MVGSRWYKFDFHNHTPASHDYKIPDISPREWLLAYMKQHVDCVVISDHNSGAWVDVLKGELENMSRDASTGDLPEFRPL |
| | TLFPGVELTATGNVHILAVLHTHSTSADVERLLAQCNNNSPIPSEVPNHQLVLQLGPAGIISNIRRNPKAVCILAHIDAAKGV |
| | LSLTNQAELTAAFQESPHAVEIRHRVEDITDGTRRRLIDNLPWLRGSDAHHPEQAGVRTCWLKMSSPDFDGLRHALLDPEN |
| | CVLFDQLPPEEPASYLRSLKFRTRHCHPVGQDSASVEFSPFYNAVIGSRGSGKSTLIESIRLAMRKTEGLTATQGSKLDQFIR |
| | TGMEADSFIECIFHKEGTDFRLSWRPDSKHELHIFSDGEWMPDSHWSADRFPLSIYSQKMLYELASDTGAFLRVCDESPVV |
| | NKRAWKERWDQLEREYLNEQITLRGLRARQGSADSLRGELSDAERAVSQLQSSAYYPVCRQLALARNELSAATLPLEHFE |
| | RRIAAIQALAEEPLQRSDIPPEPSGLLMAFMARLSSVQQQYDQRLNTLLAEYAAELAGIRREQSFIALRTAVSDQETNVESE |
| | AVSLRARGLNPDVLNELMARCESLKNELRNYDGLDGAISASVARSEQLLAEMRAHRMALTDNRKAFLSSLSLSALEIKILP |
| | LCAPYEDVISGYQTVTGISNFAERIYDNSDGSGLLSDFISERPFSPLPAATEKKYRALDELKALHHSIRLDNSEAGAGLHGSF |
| | RNRLRSLNDQQLDALQCWYPDDGIHIRYQTPGGQMEDIAFASPGQKGASMLQFLLSYGTDPLLLDQPEDDLDCLMLSMSV |
| | IPAIMSNKKRRQLIIVSHSAPIVVNGDAEYVISMQHDRTGLYPGLCGALQEAPMKALICRQMEGGEKAFRSRYERILS* |
| | (SEQ ID NO: 363) |
| 63 | MDYLSEVLKIIEGATKANASMASNYAGLLADKLEQKGEVKQARMIRERLLRAPQALAGAQRAGGGISLGSLPVDIDSRLN |
| | TVDVSYPKLDSSEIFLPAAISTRVEEFITNVQRYDEFVKADAALPSRMLVYGKPGTGKTMLSKYIATRLDFPLLTVRCDTLIS |
| | SLLGQTSKNLRQVFDYVMQRPSVLFLDEFDALAGARGNERDIGELQRVVISLLQNMDAASEDTVIIASTNHEQLLDPAIWR |
| | RFSFRIPMPLPDIHQRELIWKNRLKNMICSDLDLSDLSRKSEGLSGAIIEQVSLDARRDAVIEGASVINHHKLYRRLYLAQSL |
| | MEGVNLSTYEDEIRWLRSKDKKLFSIRVLANLYKLTSRVISNILKESGAYEQKGYTV* (SEQ ID NO: 364) |
| 64 | MSRRGTQFSNAKVTNPMLRIPFSSSDLGAIVNAGGGAKVLVDVTAEYRQGLVRNLTTSKHYLESKLSEYPGSLGTLVFKLR |
| | DQGIAKTHRPNKIAQEAGLQNAGHAKIDEMLVAAHAGCFDVLESVILHRNIKAILANLSAIERIEPWDENRKVPGGTDGLF |
| | ESSNILVRLFEYTGEDATYNNYENVISILEQHGVKYDEIRQKCGLPLLRIMDLSPNDRYILDILIDYPGIRTLIPEPKYSAFPVS |
| | VSDSVGIETNSFPVPSEELPIVAVFDTGVSPIAATITPWVVSRETYVIPPDTSYEHGTMVSSLISGAHFLNDNHPWIPDTKSKI |
| | HDVCALDENGSYISDLILRLADAVNKRPDIKVWNLSLGGGPCNEQTFSDFAMELDRLSDKFGILFVVAAGNYVDEPIRTWP |
| | NPDPLGGADLISSPGESVRALTVGSVSHMEANDALSEIGTPTPYTRRGPGPVFTPKPDIIHAGGGVHRPWNVGASSLKVVGP |
| | DNRLCSNFGTSFAAPIVASLAAHTWQRIATNTDFNVSPSLIKALLIHSAQLSSPDYSPSERRYLGAGIPNEVIETLYDSDDRFT |
| | LIFQTFLVPGVRWRKDNYPIPSALIQNGKFKGEIVITAAYAPPLNPNAGSEYVRANVELSFGLIENNTIKGKVPMEGENGQS |
| | GYERAQIEHGGKWSPVKIHRKAFNKGITSGNWALQAKTTLRANEPALMEPLPVTIVVTLKSLDGNTQVYADGVRALNAN |
| | NWAHYPLPARVPVSV* (SEQ ID NO: 365) |
| 65 | MKTVRSACQLQPKALEINVGDQIEQLDQIINDTNGQEYFKKTFITDGFKTLLSKGMARLAGKSNDTVFHLKQAMGGGKTH |
| | LMVGFGLLAKDAALRNSHLGSMPYQSDFGSAKIAAFNGRNNPHSYFWGEIARQLGREGVFREYWESGAKAPDEQAWINI |
| | FDGEEPILILLDEMPPYFHYYSTQVLGQGTIADVVTRAFSNMLTAAQKKKNVCIVVSDLEAAYDTGGKLIQRALDDATQEL |
| | GRAEVSITPVNLESNEIYEILRKRLFLSLPDKNEVSEIASIYASRLAEAAKAKTVERSAEALANDIESTYPFHPSFKSIVALFKE |
| | NEKFKQTRGLMELVSRLLKSVWESDEEVYLIGAQHFDLSIHDVREKLAEISEMRDVIARDLWDSTDSAHAQIIDLNNGNHY |
| | AQQVGTLLLTASLSTAVNSVKGLTESEMLECLIDPNHQGSDYRNAFTELAKSAWYLHQTQEGRNYFSHQENLTKKLQGY |
| | ADKAPQNKVDELIRHRLEEMYRPVTKEAYEKVLPLPEMDEAQATLRSGRALLIISPDGKTPPGVVGNFFKGLVNKNNILVL |
| | TGDKSSIASIEKAARHVYAVTKADNEITASHPQRKELDEKKAQYEQDFQTTVLSVFDKLLFPGNNRGEDVLRPKALDSTYP |
| | SNEPYNGERQVVKTLTSDPIKLYTQINENFDALRARAESLLFGTLDEARKTDLLDKMKQKTQMPWLPSRGFDQLAIEAYQ |
| | RGVWEDLGNGYITKKPKPKTTEVIISEDSSPDDAGTVRLKIGVANAGNSPRIHYAEDDEVTESSPVLSDNTLATKALRVQFL |
| | AVDPTGKNLTGNPTTWKNRLTLRNRFDEVARTVELFVAPRGTIKYTLDGSEARNGETYTVPIQLADQEATIYVFAECDGLE |
| | EKRNFTFAAAGSKEIPIIKDKPATLVSPSPKRMDSSAKTYEGLKIAKEKGIEFEQISLMVGSAPKVIHISLGEMKISAEFIETVL |
| | THLQTVLSPEAPVVMTFKKAYTQTGHDLEQFVKQLGIEIGNGEVEQR* (SEQ ID NO: 366) |
| 66 | MNKTVDFGAPSEFGMHHFYVEIPAAPRDAVVIYEDYGFDGEDSRRETVECRLILARELWTKIRDDVRRDFNARLKIKKQSS |
| | GTWSTGKVKLDRFLGRELCVLGWAAEHASPDECLVICQKWLALRPEERWWLYSKTAAEAGRDDQTQRGWRKALYCAL |
| | SDGANIKLETKKKPKSKKLQVEDETQDLFGFMEKGEF* (SEQ ID NO: 367) |
| 67 | MALQPFEWRDKPSLIEHLFPVQKISAETFKERMASHGQLLVSLGAFWKGRKPLILNKACILGSLLPATDNPLEDLEVFELLM |
| | GIDSESMQKRIEASLPASKQETIGDYLVLPYAEQIRIAKRPEEIDESLFVHIWNRVNNHLGTSAHTFAQLVEELGVARFGHRP |
| | RVADVFSGSGQIPFEAARLGCDVYASDLNPISCMLTWGALNVVGASAQKRVEIDKAQRDIVKKVQKEIDELDIESDGRGW |
| | RAKVFLYCVEVTCPESGWRVPLIPSLIISNSFRVVAELKPVPAERRYDISIREVSTDEELEFYKSGTIQDGEVIHSPDGKTQYR |
| | VNIKTIRGDYKEGKENLNKLRMWEKTDFAPRPDDIFQDRLFCVQWMKKKPKGSQYYYEFRTVTNDDLKREKKVIEHVAS |
| | KLDDWQKQGLVPDMVIEAGDKTDEPIRTRGWTHWHHLFHPRQLLFLSLVNKYSLAEGKFNFLQCMNHLSKLTRWRPQA |
| | GGGGGSAATFDNQALNTLYNYPVRATGSIENILAAQHNHCGISENVSFVVNSHPAPELDVENDIYITDPPYGDAVKYEEITE |
| | FFIAWLRKNPPKEFAHWTWDSRRSLAVKGEDEGFRTGMVAAYRKMAQKMPDNGLQVLMFTHQSGAIWADMANIIWAS |
| | GLQVTAAWYVVTETDSALRGGSNVKGTIILILRKRHQALETFRDDLGWEIEEAVKEQVESLIGLDKKVRSQGAEGLYTDA |
| | DLQMAGYAAALKVLTAYSRIDGKDMVTEAEAPRQKGKKTFVDELIDFAVQTAVQFLVPVGFEKSEWQKLQAVERFYLK |
| | MAEMEHQGAKTLDNYQNFAKAFKVHHFDQLMSDASKANSARLKLSTEFRSTMMSGDAEMTGTPLRALLYALFEISKEVE |
| | VDDVLLHLMENCPNYLPNKQLLAKMADYLAEKREGLKGTKTFNPEQEASSARVLAEAIRNQRL* (SEQ ID NO: 368) |
| 68 | MAIKRFSSRTERLDTEFLAESLKGAAKYFRIAGYFRSSIFELVGEEIAKIPEVKIICNSELDLADFQVATGRNTALKERWNEV |
| | DVEAEALLKKERYQILDQLLHSGNVEIRVVPRERLFLHGKAGSIHYADGSRKSFIGSVNESKSAFAHNYELVWQDDDEESA |
| | DWVEREFWALWTEGVPLPDAILAEIHRVSNRREVTVDVLKPEEVPAAAMAEAPIYRGGEQLQPWQRSFVTMFLEHREIYG |
| | KARLLLADEVGVGKTLSMATSALVSALLDDGPVLILAPSTLTIQWQIEMMDKLGVPAAVWSSQKKVWLGVEGQILSPRG |
| | DASSIKKCPYRIAIISTGLIMHQREKTDFVKEAGMLLKNRFGTVILDEAHKARIRGGLGDQASEPNNLMAFMLQIGRRTRHL |
| | VLGTATPIQTNVRELWDLLGILNSGAEFVLGDALSPWHDHEQAIPLITGQTQVTSEAEVWHWLSNPLPPSNEHHTVQQIRD |
| | YLSIDNKSFGYSHRFEDLDYMIQSLWLSECMTPSFFKENNPILRHTVLRKRKQLEDDGLLERVGVNTHPIKRNLAQYQSRF |
| | VGLGIPTNTPFQVAYEKAEEFSKLLQSRTRAAGFMKSLMLQRICSSFASGLKTAQKMLKHTVSDEDEDLVEDVEHLLSEMT |
| | PAEVACLREIETQLSRPEAVDSKLNTVKWFLTEFRTDGKTWLEHGCIIFSQYYDTAEWIAKELAKSLKGEVVAVYAGVGK |
| | SGLFRGEQFNNVERELIKSAVKTREILLVVATDAACEGLNLQTLGTLINVDLPWNPSRLEQRLGRIKRFGQTRKFVDMLNL |
| | VYSETQDEKVYNVLSERLRDTYDIFGSLPDTIDDEWIDNEEELNTRMDEYMHERKKAQDAFSVKYRGTLDPDAHLWERC |
| | ATVLSRRDIVSKLSEPWGS* (SEQ ID NO: 369) |

TABLE 16A
Additional tested homologs of predicted defense systems

| System | | Observed | # | Source | | Pro- | | | |
|---|---|---|---|---|---|---|---|---|---|
| # | Name | Activity | Genes | Organism | Strain | moter | Codon | Gene A | Gene B |
| 1 | Retron-TIR | + | 1 | Escherichia coli | NCTC9024 | Native | Native | STF89551.1 | — |
| 2 | Retron-TOPRIM | − | 1 | Escherichia coli | NCTC13441 | Native | Native | WP_000476153.1 | — |
| 5 | RT-nitrilase | − | 1 | Escherichia coli | N1 | Native | Human | WP_001121606.1 | — |
| | (UG1) | | | | | | | | |
| 7 | RT (UG3) + RT | − | 2 | Escherichia coli | NCTC9091 | Native | Native | STJ76581.1 | STJ76580.1 |
| | (UG8) | | | | | | | | |
| 7 | RT (UG3) + RT | − | 2 | Salmonella | NCTC6026 | Native | Native | WP_001530977.1 | WP_001185451.1 |
| | (UG8) | | | enterica | | | | | |
| 7 | RT (UG3) + RT | − | 3 | Acinetobacter | NCTC7412 | Native | Native | WP_000227776.1 | WP_000620968.1 |
| | (UG8) | | | calcoaceticus | | | | | |
| 8 | RT (UG15) | + | 1 | Escherichia coli | STEC66 | Native | Human | WP_032207424.1 | — |
| 10 | ATPase + | + | 2 | Escherichia coli | NCTC11116 | Native | Native | WP_096949333.1 | WP_001538182.1 |
| | adenosine | | | | | | | | |
| | deaminase | | | | | | | | |
| | (RADAR) | | | | | | | | |
| 13 | STAND | − | 1 | Escherichia coli | NCTC10650 | Native | Native | SQB54359.1 | — |
| 21 | Transmembrane | + | 1 | Escherichia coli | NCTC8620 | Native | Native | WP_048228060.1 | — |
| | ATPase | | | | | | | | |
| 22 | ATPase + QueC + | + | 4 | Escherichia coli | ECOR10 | Native | Native | WP_000269401.1 | WP_000537316.1 |
| | TatD DNAse | | | | | | | | |
| 23 | DUF4011- | − | 1 | Citrobacter | NCTC9067 | Native | Native | WP_115191085.1 | — |
| | helicase-Vsr- | | | braakii | | | | | |
| | DUF3320 | | | | | | | | |
| 28 | ATPase + | + | 2 | Escherichia coli | ECOR12 | Native | Native | OWD36540.1 | OWD36541.1 |
| | protease (ietAS) | | | | | | | | |
| 28 | ATPase + | − | 2 | Escherichia coli | NCTC9008 | Native | Native | WP_001460375.1 | WP_020244573.1 |
| | protease (ietAS) | | | | | | | | |
| 30 | Retron-protease | − | 1 | Proteus | 127_PMIR | Native | Native | WP_161800346.1 | — |
| | | | | mirabilis | | | | | |
| 30 | Retron-protease | − | 1 | Yersinia | 404/81 | Native | Native | WP_054888011.1 | — |
| | | | | aleksiciae | | | | | |
| 30 | Retron-protease | − | 1 | Yersinia | 3016/84 | Native | Native | WP_054872116.1 | — |
| | | | | bercovieri | | | | | |
| 30 | Retron-protease | − | 1 | Yersinia | ST5081 | Native | Native | WP_050337179.1 | — |
| | | | | enterocolitica | | | | | |
| 31 | RT-nitrilase | − | 1 | Escherichia coli | NCTC4169 | Native | Native | WP_001521910.1 | — |
| | (UG5) | | | | | | | | |
| 31 | RT-nitrilase | − | 1 | Klebsiella | KPNIH39 | Native | Native | WP_023301376.1 | — |
| | (UG5) | | | pneumoniae | | | | | |
| 32 | TOPRIM-RT- | − | 1 | Pseudomonas | DSM16299 | bla | Native | WP_084139843.1 | — |
| | nitrilase (UG10) | | | rhizosphaerae | | | | | |
| 32 | TOPRIM-RT- | − | 1 | Vogesella | DSM3303 | bla | Native | WP_120809745.1 | — |
| | nitrilase (UG10) | | | indigofera | | | | | |
| 33 | RT (UG7) | − | 1 | Escherichia coli | NCTC9069 | bla | Native | WP_000064054.1 | — |
| 34 | RT (UG9) + PolA | − | 2 | Photorhabdus sp. | CRCIA-P01 | lac | Native | WP_118986603.1 | WP_118986604.1 |
| 34 | RT (UG9) + PolA | − | 2 | Pantoea sp. | B40 | lac | Native | WP_042677494.1 | WP_128574327.1 |
| 34 | RT (UG9) + PolA | − | 2 | Vibrio | DSM17657 | lac | Native | WP_051241322.1 | WP_083962817.1 |
| | | | | litoralis | | | | | |
| 34 | RT (UG9) + PolA | − | 2 | Pseudomonas | Wood1 | lac | Native | WP_080587824.1 | WP_027911782.1 |
| | | | | brassicacearum | | | | | |
| 35 | DUF4297- | − | 1 | Escherichia coli | NCTC9036 | Native | Native | WP_060615938.1 | — |
| | STAND | | | | | | | | |
| 36 | DUF4297- | − | 1 | Salmonella | NCTC10718 | Native | Native | WP_115407481.1 | — |
| | STAND | | | enterica | | | | | |
| 37 | ATPase_GHKL + | − | 2 | Pectobacterium | CFBP3304 | bla | Native | WP_005974598.1 | WP_005974600.1 |
| | Helicase_SF2 | | | wasabiae | | | | | |
| 37 | ATPase_GHKL + | − | 2 | Vibrio | ATCC43516 | bla | Native | WP_061066216.1 | WP_061066217.1 |
| | Helicase_SF2 | | | harveyi | | | | | |
| 38 | ATPase_GHKL- | − | 1 | Raoultella | NCTC9528 | Native | Native | WP_112150151.1 | — |
| | DUF3684- | | | planticola | | | | | |
| | DUF3883 | | | | | | | | |
| 39 | TerY-P + helicase + | − | 7 | Obesumbacterium | DSM2777 | Native | Native | WP_057631338.1 | WP_057631339.1 |
| | HEPN + | | | proteus | | | | | |
| | ATPase + | | | | | | | | |
| | DUF2357 | | | | | | | | |
| 40 | Kinase-helicase | − | 2 | Escherichia coli | NCTC13919 | Native | Native | WP_000877066.1 | WP_001294844.1 |
| 41 | Helicase-DUF559 + | − | 5 | Plasticicumulans | DSM25287 | Native | Native | WP_132537919.1 | WP_132537920.1 |
| | SMC + McrB + | | | lactativorans | | | | | |
| | DUF2357 + | | | | | | | | |
| | ATPase | | | | | | | | |
| 41 | Helicase-DUF559 + | − | 5 | Yoonia | DSM29955 | bla | Native | PUB10544.1 | PUB10545.1 |
| | SMC + McrB + | | | sediminilitoris | | | | | |
| | DUF2357 + | | | | | | | | |
| | ATPase | | | | | | | | |
| 42 | GTPase + | − | 3 | Pantoea | DSM3873 | Native | Native | WP_084873987.1 | WP_084873988.1 |
| | GTPase + TM | | | cypripedii | | | | | |
| 43 | TM + GTPase + | − | 3 | Escherichia coli | NCTC10962 | Native | Native | STI27515.1 | STI27516.1 |
| | GTPase | | | | | | | | |
| 44 | Dcm + HerA + | − | 5 | Pseudomonas | NCTC10727 | Native | Native | WP_031690635.1 | WP_004363346.1 |
| | Vsr | | | aeruginosa | | | | | |
| 44 | Dem + HerA + | − | 5 | Aquimonas | DSM16957 | Native | Native | SDD97145.1 | SDD97170.1 |
| | Vsr | | | voraii | | | | | |
| 45 | RecQ | − | 1 | Klebsiella | NCTC11696 | Native | Native | WP_032728854.1 | — |
| | | | | oxytoca | | | | | |
| 46 | Histidine kinase + | − | 2 | Pseudomonas | NCTC13717 | Native | Native | WP_003450792.1 | WP_003450790.1 |
| | phosphoribosyltrans- | | | aeruginosa | | | | | |
| | ferase | | | | | | | | |
| 47 | PH-TerB- | − | 2 | Klebsiella | NCTC11357 | Native | Native | WP_126494466.1 | WP_023316678.1 |
| | DUF726 + TM | | | pneumoniae | | | | | |
| 48 | TerB + DUF2791 + | − | 3 | Escherichia coli | NCTC9024 | Native | Native | VDY98671.1 | VDY98669.1 |
| | Lhr helicase | | | | | | | | |

| System | | | | | | |
|---|---|---|---|---|---|---|
| # | Gene C | Gene D | Gene E | Gene F | Gene G | bp |
| 1 | — | — | — | — | — | 2393 |
| 2 | — | — | — | — | — | 2569 |
| 5 | — | — | — | — | — | 4154 |
| 7 | — | — | — | — | — | 3648 |
| 7 | — | — | — | — | — | 3818 |
| 7 | WP_000837118.1 | — | — | — | — | 4236 |
| 8 | — | — | — | — | — | 1951 |
| 10 | — | — | — | — | — | 5533 |
| 13 | — | — | — | — | — | 4781 |
| 21 | — | — | — | — | — | 4037 |
| 22 | WP_000192874.1 | WP_000020778.1 | — | — | — | 4891 |
| 23 | — | — | — | — | — | 6502 |
| 28 | — | — | — | — | — | 3678 |
| 28 | — | — | — | — | — | 3917 |
| 30 | — | — | — | — | — | 2009 |
| 30 | — | — | — | — | — | 1946 |
| 30 | — | — | — | — | — | 2032 |
| 30 | — | — | — | — | — | 1996 |
| 31 | — | — | — | — | — | 3679 |
| 31 | — | — | — | — | — | 3479 |
| 32 | — | — | — | — | — | 7494 |
| 32 | — | — | — | — | — | 7656 |
| 33 | — | — | — | — | — | 3894 |
| 34 | — | — | — | — | — | 3208 |
| 34 | — | — | — | — | — | 3211 |
| 34 | — | — | — | — | — | 3196 |
| 34 | — | — | — | — | — | 3382 |
| 35 | — | — | — | — | — | 6514 |
| 36 | — | — | — | — | — | 6261 |
| 37 | — | — | — | — | — | 10166 |
| 37 | — | — | — | — | — | 10210 |
| 38 | — | — | — | — | — | 5918 |
| 39 | WP_057631340.1 | WP_057631341.1 | WP_057631342.1 | WP_057631343.1 | WP_080376085.1 | 12191 |
| 40 | — | — | — | — | — | 6873 |
| 41 | WP_132537921.1 | WP_132537922.1 | WP_132537923.1 | — | — | 11931 |
| 41 | PUB10546.1 | PUB10547.1 | PUB10548.1 | — | — | 11041 |
| 42 | WP_084873989.1 | — | — | — | — | 4789 |
| 43 | STI27517.1 | — | — | — | — | 4577 |
| 44 | WP_004363343.1 | WP_003131012.1 | WP_071534163.1 | — | — | 11911 |
| 44 | SDD97192.1 | SDD97211.1 | SDD97232.1 | — | — | 11635 |
| 45 | — | — | — | — | — | 5424 |
| 46 | — | — | — | — | — | 4088 |
| 47 | — | — | — | — | — | 3637 |
| 48 | VDY98667.1 | — | — | — | — | 6037 |

TABLE 16B
(cloned sequences of systems #1-48)

| System | | |
|---|---|---|
| # | Name | Cloned Sequence |
| 1 | Retron- | atccctgaattccccgaaggtgaacaatccactgttcacccttcaccgtatattaacccgttatcacactgaaattaaaagagaaaaatgaaaggtgaacagtgtgaacaatca |
| | TIR | aatcaaaaaaactttctactcccactatagcctgactggtcgtctccaaaacgagcggaaaagcatcaacaatgaatagttaactgttaactccgcgccaactcattaccactta |
| | | actcaatgatattaaatggaaaactatcgaaatgaatactctgcaaaattaaatgcaaaaaaatatatgccagtcaaatttcgttacgcactctcttccaagaaagagataaatgc |
| | | tttatacgtccaccatactatgttatttttttaatacggctctgccttaaatctgtgaggttgtttcgcctcgaagtatcttatgttagcacatcacgctaccaatcagcggttagttactt |
| | | gacgtaactgttaattggctaaagtttgcatagagtgattgggcggagccgtaaatttagtccataaatacagtaacgaggtagagagtgtctttacatgacaagctactgatgc |
| | | ttagtctcaattcggcgaataaagaagaagatgagacaatcccggagttacctaagttagagcctcagccctatcaagctggaaataagttgaaatgggataataaagagctg |
| | | aaaaatcagcccatcacttcaaagaatgacattaatgtaatatgcaaaaaaattgaaaacaaaagcattgtaattacatcagcaaacgatgtagccaatctgttagaagtcccg |
| | | gtcggacaattattatttattttatataataaaaaagataactatagaacttttgaaataaaaaagaaaaatggaaaaagtagaatcataaatgcacctcaaggcggtttatcaattc |
| | | tgcaagagaaattaaagccagttcttgagtacttttatcgccccaaaaaaccagcacatggatttattaaggataaaagtatattaacaaatgcagaaaaacatacaaagaaaa |
| | | aatatgttgttaatgtagatttagaaaattattttggttcagtcactttcgctagagtatatgggatatttaaaagtaagccatttaatttctctcatcctgcggcgagtatattagctca |
| | | actatgtactaaggatggaaaattacctcaaggagcatgtacctcccctgttctagcaaatttagcatcagcctcactcgataaacacctaacccaactggcacgtagaaaaaa |
| | | catcacatatacaagatatgcagatgatattactttttcatttaatcaacgacaagtcagagaaatcataacgctagataatgaaaataattttgaattgggcgaggcgattatctct |
| | | gtgatagagaaaagtggcttcagcataaacacaagtaaattcagagttcagaaaagaaatgaacgtcaaaaagttactggtctagtggtaaatgaaaaagtaaatgttgagcg |
| | | taaatatcttagagttactcgttcattagttcataaatggagagaagacaagttaacatcagcattgttgtttgttactaaaaaaggttttaaggcaacaaataacgaacatgctata |
| | | tcaatttttcgcaatcatatttatgggcgattgagttttataaaaatgatccgtggtgaggacttcccgttatatcttaaattaatggctgaaatgagtcatcatgatcctttaaaaaca |
| | | aaagaagggcttagagcaatgaaagaaactgaaacttacgatgtatttatttgtcatgcaagcgaagataaaacatccatcgcaattccaatttacgaagaattaattaaattaa |
| | | atatatcaacattcatagatcatgttgaaataaattggggcgattcattaatccaaaaaattaactcagctcttgtaaagtctaaatatgtaattgccattctttcggctaattctgtag |
| | | ataaacattggcctaagaaagaattgcattctgtgcttgcaagagaaatcactgaaggtgaagtaaaattacttactcttgtaaaagaagcagatgaagcaatagttgctgaatc |
| | | tttgccgctcttaagtgataagctttatatgacctataaagataatccggcagaagttgcagataaggttcgtgcgcttttaaacaagtgacagctactgtcaaatgtgtataaagt |
| | | cattgatattttatataaaatcaatggattgcaatccatataagattccttatgcatcagtgacccggtgctcgcccggtcactgcttcagtcccagcagaactcagacgaggcg |
| | | cttaacatctaacgggatgccaacccgacgtttggttttatcggctatctagcctatatagaagca (SEQ ID NO: 370) |
| 2 | Retron- | cacgtaaatatgaaaactgttagcccacatagcccaacaaaaatatttgatagttaaccttctgttactaaagaaaacaggaaagtaaaagtgggctaaagcttatgcgccctc |
| | TOPRIM | gatgttgggctagccccaaaaacggtaaatttagcttaagtgcataattggttagctcaaaagcattatttttcatttaaataaattagttaattggtcttgtttagatgattcaactgg |
| | | gctgactactttctttgtatatactccggataaattttcccagctaacttgcctaatcatcactctgatgccagaaatgaacagaacgcaaaccatctataacttattgaggattttga |
| | | aaaaaattgattgggggcttgagttatatgatgactatgctaatttaatacggcacatgcaggtagatttgttggttgtggtatcgcaatcagtgttaacaaggtcgggagtattcg |
| | | ccctctgactgccgtcaagtcatcttggcgtcaccgttaaatgcgtaagagtacctgcatgtgcattaacataatcaataatggaatttactgttatgtttaaacctacctatctggc |
| | | aaggctgcaggcttgttgtaacaaatttgaactggctgatttgcttcagattaaagttacatttctgactaatgttttgtatagaataaggccagaaaatcaatacaaaaaatttacta |
| | | taaagaaaaagtctggaggagagcgggagatctttgctcctgatgaaaaactgaaagatattcaacaacgactttctgaacttctatatatatgccaggaagaaatttgggcaa |
| | | aaaataatattaaacaaaatgtatcacatggttttgagaagaataaaactataattacaaatgctgagaggcatcgagataaaaatattgtatttaatattgatattgagaatttcttc |
| | | ccatcctttaattttggtcgcgtgcgaggatattttattgcaaaccaaaatttcaagttacatccaaatgttgcaaccattattgcgcagatagcctgcctggatggatcgcttccgc |
| | | aaggaagcccttgttctccagtaataactaatcttatttgtaggattttagatttcagattatcaaagctagcagtcacatatggttgtagttacagccgctatgcagatgacattac |
| | | gttttcaacaaacaaaaaaaacatccctgatgcattagtttctaatgagaaagaaaacgaaccaggtaagatattggtagaagaaattcatcgtgcaggcttcactttaaaccat |
| | | aataaaaacagagtgtctaggtgtacatcaagacagcaagttacaggtttaactgtaaataaaaaaataaatgtaagcagagagtatataaagaatacaagagcgatggcgc |
| | | attctttatactttgaaggttcgtatacacttattgagaaagatggaaaacatagaaagggcacccttagtgaattagaagggcgatttgcatttatcgatatgcttgataaatataa |
| | | taatgtggaagcaaagaaaaatgcgcgtcctgagagatatgtggttaaaggatttgggttggattttaagcagagacttaactccagagagaaagcatacagcaaattcctat |
| | | actataaaaatttctatggaaatgagcaaataacaatcttaacagaagggaaaactgacccggtttatcttaagtgtgcaattgattctttgtttttggattaccctcagttagttaga |
| | | gaggaaaaaaacacaaagaatagagtgttaaaagttaatttatttaaaaccaatgacaagaaaaaatattttctcgatttgtctggtggagctgcagactattcgaggtttttcag |
| | | acgacatggtttactttgtaaagcgtatgaaaaacagcctcctaaaaatccagtgataattttattagataatgacacagggccatctgacttcataaatcaaataataaaggatta |
| | | ttcgcatctaccaaaaaaagcggaggatgttagaaaaggggcgttttatcacttagagagtaatttatatgttctttttactccgttattaccaggggataactattcttcactagag |
| | | gatttttttgaaccaaaagttttgcaaatgaagtataatggaaaaagcttcgataaaagcaataatcatgacagttctactacatttggaaaagatagatttgctacttatatagtaa |
| | | gggaaaatagaaaaactatcgatttttcattattcaaacccatacttgattcaattattgaaatcaaaaaacattttatcaatctacacccatcaaagtgatggttatgaaaagagat |
| | | aaaaatgctgatgtcaaaagaggcttatgctcggcacagtggagtgagctgccaaactgtcgatgactgggtagccggtggggcggaagtagttatgtcccgtagcaaggt |
| | | taagatttgctcttgtgtgtggggaaccttagtcaattactttcctggcgcactgtgttagattttgtaaaattttaaaagactaaagatttaatatcacttctccatggaggttgtg |
| | | (SEQ ID NO: 371) |
| 5 | RT- | gtggcaagattataccccatcaggcataagatgctttgacttataacgcatcagtttgaaacacaatggtgatgggggtcacaggggctgacatgtacttttaagattaaaaag |
| | nitrilase | cattaacatctacttttgaagaaaacagaaaaaaacaatcacaaacctttaaaaacaaaaactatgccaattattaataaaaagtatcaagagcttcagttaacagatgagtacat |
| | (UG1) | taccgatccactgctcatggccctagcctggaagaaaagccatcactacatacgtaccacaaattggtatgctgacaactttgaactagacctgtcggctttggacctaatgca |
| | | gcactgtaaagattgggtcaagagaatgcaggacaaaaaagaatttaaattttcagagctacaacttgttcctgtaccaaaagcctgtaaatgggagtttaagactgtcgaaaa |
| | | taaggttctatggcaaccttgtgatgaaaaagaacttaccctacgcccccttgcccatatacccatagctgaacaaaccatcatgacattagtcatgatgtgcctagccaataca |
| | | atagaaaccaagcaaggaaacccagacaccagctatgacatcgtccaccagaaaggtatcgtcaattacggaaatagactttattgtcagtatattgacgataaagcagagc |
| | | acagcttcggtgcaacagtgacatatagtaaatacttcactgattatcggaaatttttaaataggccttatcattttgcgtcaaaagcgcaaggtgaaatttcgccggacgaagcc |
| | | gtttacatcatagaactagatcttgcgaagtttttcgatttagtaaacaggaagactctaattcaaaagataaaaaaccatatcagtgagtcaataaacaataaagaaaacccact |
| | | cgccaatcatttatttaaatgttttgcaaactgggactggactgcatctagcataaaaaattatgacatatgcaagtcagacgaagtaacagaaataccaaaaggcatccctcaa |
| | | ggattggttgcagcagggtttctatcaaatatttacttacttgaattagatcaattcttgcataataaaattaacacagacataactgatgacattaaatttgttgattactgtcgatatg |
| | | tcgatgacatgcgatttgtggttaaggttaaaaaatcaaaaaataataataccgcattcataaatgatgtaataaccaatcttcttaaaaatgagatagataatcttggactgataat |
| | | taatcctaaaaaaacaaaagtagaaatttttagaggcaaatccgcaggcatctcgcgtagcttggaaaacatccagaccagattaagcggcccaatatcaatggatagcgcc |
| | | aacgaacaacttgggcatcttgagtcattattaagtctgacaaaaaccgattttgaaccaccgaaaaatggtaaatcaaatagattagctgagattgaaaaagaccgtttcgatg |
| | | tcagggaggacactcttaagcgcttttctgccaataaaatcagtaagatactaaaagagttaagacatttcatctcgcaggatatagatactgatggggaggttattgccgggg |
| | | aatgggattatctgcaagaacgtttggcacggcgttttattgtctgttggagccatgacccgtcactggcactgctactcaagaaagggctggaacttttccctgatcctaagct |
| | | attagaccctatacttgaacagctttgctcactcattgaaagcgataatgaaaaacaaagtgcagtagctacttattgccttgctgaaatatttcgacattcagcaatgactattcat |
| | | aaaaaagacacctatgcattccctgcacaagccaatgtggatgggtactttgaaaaaatacaacattgcgccgcgacattcattaataagcgcagcgcctctgacaacgaaa |
| | | cttggaacctgttaattaatcaggctagttttctgttgcttgtgcgtttagataatacattagaaaaaaatggcactgatgccaggcatgatcttatcttaaaactggcatcaggcttt |
| | | agaacaattacacttcccactaaaatggatagcaagactatagcctcatgtattttgttggctagtcaattagttaaagataacaaaccatttattcgctcctgcgcttctttgtgcg |
| | | aaagaatttatgacaaagaacacgtcataaaattgaagaaaatagttagcataatatcacatcaaaacttatcattgtttaaatccttagtttatcattcacgacctttacaacagaa |
| | | gtggctaaactcagactccgtgaaaataataattaatgaatgccatatagatatacaacctttggcgacttctttaggcatgataaaaagtagtcactcattacttagaatcatatc |
| | | aagacctgataacccatttgccaatgagataatggcattaaaactgatgcaagcccttttattggacaggattgtttgcctggataataaaaaagattatcaaataagtgtagcaa |
| | | acaccaaagtgacgtttcataactactccaaccctccaacatcgaatgtcttcgatgcaggaatggatatggatgcaaaattattcaaatcatcgggatgggtcgattctattttc |
| | | acggatgatgcagacactcaaatattgtatagagttgccatgtgcatccgttcagtactactcggcaaacaagactggacagattttggtcaagcaatttcccccaaacagggt |
| | | tatcggggtattaaaactagtagagacaaacgtcaattggggatgatgacaacacctgagtccattgccggtgagaactctcaggtttctggttggcttaccacactcttatcca |
| | | agttgcttgcctggccgggaatttcagtgggtgataatggatatcaatggccagcaatttttacagtagatgctgtcagaaaactagttgatgctcggctgagtaaacttaagca |
| | | ggattactgcaaactatcaggaactccgggacttacagaaaaaatacagttcaactggtctgactcgaaaaaagccctaacagttgctatggtccagtcaaaactgcctgcaa |
| | | cgaaagattttgtcagccatggacttcttttaaactccgcaaagtatagagtgattcatcgcagacatgttgctgaagtggctgatttagttgtaaaacacacgcttgcacaaaaa |
| | | acaactcaacgaactcatggtgaaaaaatagagaacattgatttaatagtatggcctgagctcgctgtacatagtgacgatttggatgtactcatcgccttatctagaaaaacga |
| | | atgcaatcatatactcgggcctgacatttattgagcaacctggaatcaaaggaccaaataattgtgccgtttggattgtcccacctaaaagcaatagcagccagaaagaaatg |
| | | ataagacttcaaggcaagcataatatgatggaagatgagaaaggccgggttgaaccctggagaccataccaattgatgcttgaacttgttcacccccaatttactgataaaaa |
| | | aggatttgttctcacaggctccatttgttatgacgcaaccgacatcgcgctaagtgcagatctcagggataaatcaaatgcttatcttgtagcagcattaaacagggatgttaata |
| | | cattcgattccatggttgaagcactgcattatcatatgtaccagcatgttgtgctcgttaactcaggggaattcggaggatcttacgctaaagcaccttacaaggagccgtttaat |
| | | cgtttgattgctcatgttcatggcaatgatcaggtagctataagtacgtttgaaatgaacatgtttgatttccgtcgtgataatataggaaaaagtatgcaatccgggttagataaa |
| | | aaaactgctcctgcaggaatcataatgtaataaatattagatatttttatattagaggtgaggagatggcgtcacctctaatattttcgctgattgtatttagcatcaaataataaagg |
| | | tacaattaatttaagtgactatcatgaaaaaattagttccgccatatcaagtaaccccggcacaaatctatcgttccgttgccagttctacagccattgaaaccggaaaac |
| | | (SEQ ID NO: 372) |
| 7 | RT | gcgttgaatggtataactatggcacggttaccgcatgttttgagctgtaatcgaagttatgaaaattgctatataaagcggtcgctgttgtggagatacgattgcgggaagtgat |
| | (UG3) + | ggaaagagctataaaaagtacagaggatagtttaatgagggtattatgaaccgtcagccgtttacttcagcagcacttaaacgaaacttaagtgaaagtgagaaggcttattat |
| | RT | tttaaaaaaaataatgttgctgagttagaatcattaattagtgatgccgttttaattgctaatgagaattttcgctctggtgtgagtgtaaagaaactaaatattaagggacgctgcgt |
| | (UG8) | ttacactgcttcatgtttgaaggaaaaaataatacttagacattgcaatgcaaatttaaaatgccttgaatcgcttcgtcccaaacaacgaaatacaataattagtgagcttaaaatt |
| | | tatttggaagaaggtactccattcaaaatatatcgtttggatataaagtctttctttgaatcaattgatttaccgcagctttttcagctcttacataacgaaacacgactgtctagacat |
| | | acaaaaaatttgctagaatggtatcttaaatcgtgtgaaaggcttcactcttcgaaaggattacctagagggttagaaattagtcctatgttatcagaattgtacttggcacaatttg |
| | | ataatagtattcataggcatccagaagtattttattattcaagatttgtagatgatatggtaatcgtttcaagtggttgtgaatgtgaagcgtcctttatggaatttatacaagatgtatt |
| | | accaaagggattggctttaaataaaaataaattaaaaatatctccatgcataccaaagagaagtaagggtttaaataaacaggataaattgcttcatgaatttgactttctagggt |
| | | actcgttttctataatagacacacctttgagcaaagatggtgagattaatagctgttacagaaaggttgttgttaatttatctaaatctcgcctgaagaaaattaaaacaagaatag |
| | | ctaggtctttctactcttatcatattaatggtgattttaaactattgctagacaggatttcttttttgactagtaacagggatttaaatcgcaaaataaaatcgttaagttctttagaaaaa |
| | | agcaagataagtacaggtatttattacagtaatgcgaagttagatgttgactccatatccctaaaaaaattagatgactttttgctatattgtgtgcaatctaatactgggcgtttgaa |
| | | tagtgttgcaaaaaaaccttttaatttgaagcaaaaaaaagaactgctaagaaatagttttagaaaaggctttgtggatagagtatatagaaagtataactttaagcgctatactga |
| | | gattacaaaaatatggttataaagaaaaacattaaacttgataagaaagattatctcagggctttactatgtgatacactgcccggtgattgtccaattattttttcaaatgatggctt |
| | | atatataaacttaacagaatatgatagagtttgtaatgatttgttacattttactccggtttcttctttcttaaaaaaaatagttaaccctaatttagactcttctattagtgtcgcagatcg |
| | | ccaccgagaaaagaagaaacaaagctccccatttggctattgtatagtaaaagatgcctttagccaaagacatctttctttaattcacccaagatctcaaattaattattcggaatt |
| | | ttataaaacatactcatccgttatcacattaaatactttaaaaagtaatttttctattcgctacccacgtaaggtcgctaactctttctttttatatgaaaataatgctttggaaaaatata |
| | | aaggggaagatatcgaaacaacaaaggatgagttaatgaggaaatattcatcctcttattttagttatggcggtttcaacaggatatataaactatttcaaagtaagatgtttattg |
| | | agcttgagaaaagattctcggtgatgtggatgttagatgtatcacattgttttgatagcatatatacgcattcggtttcttgggcattaaaaaataaatcatatatcaaaaaacatgtt |
| | | aaacacagcaatcaatttggacaagaattagatacactgatgcaacgtagcaataataatgaaacaaatggaatacctattggttcagagtttagcagggtttttgcagaattaa |
| | | tatttcagcgaattgattgcaatattgagtcatgccttcttagtgaacatggatgggttaataataaagattatgttatattgagatatgtagatgattttattgttttttgtaatggtgagt |
| | | caagtgccgaagttattacaaaaataattaatgtgaagttaaatgaatataatctacaattaaatgtaaacaagcttaagaagtattctaggccattttgcactagcaagacaagtt |
| | | tgattgtcaaagttaatgaattaattcgcaatttagaaattaaactgtatgaaaaacgtgatagtggctttactttaaataaaataagaagtaagcatgatttaaagatatatgtaatta |
| | | atcatgtcaagtctatatgcattgaaaatcaagtgtcttattctgatgtttcatcatatataatatcatctctttccaaaagattaatatcaataattgatatattacgagttcaagaaaat |
| | | gaagatgatgtagatgtaaaaaaaaggattaaggacttaattttcacaataaccgatattatgttgttctttttcagtgttaacccaactgtttcatcatcttataaattatcaaagaca |
| | | atggttgttgttaataactatttgaatgaaatatctagtgactatagtagtatttttatgactacgttagtgaatgctgcggaaaacattaattttggtgagaatgataatgggctgttta |
| | | ttgatgatttcatttcaattgaaaaggttaatttaatcttggctgctactttttttggagataattatcttataagtgacagtttttttcatggagttatacataaaaagaaattggactactt |
| | | tactataatctcactgctattctattttagaaacagaagatcattccgaaaattgaagtgtataatagagggtgaaataaaggaaatattaagttctaatatggatttgctgcaatcat |
| | | cggaaaaggcacatttatttttggatgtcatgtcatgtccatttgtctcaatagagacaaggcgttttttatatagaaaatatctcaagagctatgagccaaagctgaacagaagtc |
| | | atctggagattgagaatgatttgcaatctctgcttcaaacatattggtttgtcaagtgggatgagttagatattgtgaaaatgattgagaaaaaagaattgaaagaaagctattaat |
| | | ttgataaatatgagtcgtggtcagtttcaaaatacttacgtcatcgtcgtcggtgtattttatatcgattatgaagacgatttcgctggaactgaaatcggcttgaatgcttaaactta |
| | | agctaaaaaaacagtttgagaccaaagcctaaattattaggctttggattttcaggttcagttgagagtaattgctgtctg (SEQ ID NO: 373) |
| 7 | RT | agatacagtctccatcatactcagaggcgcataccccttacatatctcaggtttatctggcttaggctatgacgctaacccactagagaatcggagaaaagtaaagactgtttga |
| | (UG3) + | tttgtgagcttgattgattgcaatttaagcgctcgacacagggcaggatgccaaacaccttcaacagagaggtcggtagctccagcatatgcaagctaacgttgctttggaact |
| | RT | tcaactaagtaccaagagtggacggttccttagtatcaggcaagtatatgattgcacctagcggtgtaaagagttataaaaaagcataaaacgttgtattgtgagactttaatga |
| | (UG8) | accggcagccatttacttcatcagcacttaaacgtaatttaagcgaaagtgagaaagcctattattttagcaaaggaaatagcgaaaaattagaatcattaattaacgatgcagt |
| | | attaattgccaatgaaaattttcgttctggagtcagtgtcaaaaaattaaacatcaaggggcgttgtgtttattccgcatcgaatttaaaagaaaaattaatactgaggcattgcaat |
| | | tccaatctgaagtgtctggaatcacttttgcctaaacaaagaaataaaataattgatgaattgaagctttatcttagagaaggcacacagtttagggtttatcggctagatataaag |
| | | tctttttttgagtccatccagttgccccagctttttaaatatatgcatgatgagtcgagactatccaggcatactaaaaacctgctagaatggtatcttaaagcttgtgagcgtattca |
| | | tgccacacaaggcttacctagagggcttgaaattagtccaatgctatctgaattatatttgtcagagtttgatcgcaatatcaatcgacatccagaagtattttattactccaggttt |
| | | gtagatgacatggtgattatttcaagtgggaatgaagaccaaaagacctttatgaaacaggtagtggatttccttcctaacggtttgaaactaaataaaaacaagctaaacatat |
| | | cccctttaattcctaaaagaagtaaaggggataataataatgataaattactccataaatttgatttccttggttattcttttgcagttatagatacaccattagcaaagaatacagtaa |
| | | acatcatatatagaaagataattattgacctatcaagcggtcgattgaaaaaaataaaaacaagaatatcaagagccttttatgcatttaagaataatggtgattataagctattact |
| | | agacaggatttcttttctaactagcaatagagatttaaacagaaaaattaaatcactgagttcaactgagaagaccaaaattagcaccggaatatattatagcaacgctcggctt |
| | | gacgaaaactccaagacactaaagcaactggataactttttaatttattgtgtaatgtcaaatagagggcgtttgaatagtgttgccaagcattctttaagtataaaccaaagaaa |
| | | ggaattattgcgaaataattttacgaaaggtttttctgcaagaatttataggaaatataattttcaacgttatacagagattactaaaatatggctctaaaaaagaatattaaacttgat |
| | | aaaaaggattataccagagctttgttgtgtgatacccaaccagcagactgtccgattattttctcaaatgatgggctttatgctaatttggcatattttgatgttaactataaaacatc |
| | | aacagattttactcctctttcatctttcttaaaaaaaataattaacccatcgttggacttgtctattacggttgatgaaagagagcagaaaaggaaaaaacagagcttccctttcggt |
| | | tactgtattgttaaagattcttttagcttgagacgtctttctttaattcatccgagatctcaacttaattattgtgagttttacaaaaattattcatcagttataacctacaattcatcaaaga |
| | | gtaattattcaataagatatcctaagaaagttgccaattcattctttttatatgagaagaatggagcggaaagatataaaggggaggatattgaaactactgaggatgaattaatg |
| | | aggaagtactcttcttcatatttttcgtatggtggtttcaatagaatatataaattattccaaagtaaatctttctttgaacttgaaaaaagattctctataatgtggatgctggatgtatc |
| | | acattgttttgatagtatctatactcactcagtgtcgtgggctttaaaaaataaagcttacattcgcaagcatgtaactaacagtaatcagtttggtcaagaattagatacattgatgc |
| | | agcgaagtaataataatgaaacaaatggcatcccaataggctctgaatttagtagaatatttgccgaattgatcttccaacgaatcgacaataatattgagttggatcttatggat |
| | | gagcatgggtggaaaaataaaaaagactatgtgatattaaggtatgttgatgattttattgtgttttgcaataatgaatcgaatgcagaaataatttctaaaactattaatgtgaaatt |
| | | aaatgagtttaatctccaactaaataaaaataaattcaaaaaatattcaagaccattctgcactagcaaaacaggacttattatcaaagttaatgagttaattcaaaatttggaatca |
| | | aaattatacgaaaagcatgacggcaatattgttcttaataagataagaaataagcatgatttgaaagtatatatgattaataacattaagtctatatgcttagatagtcaggcttctta |
| | | ttcagatgtatcgtcctatttgttatcctcactgtctaaaagattaatagcacttatccatcacttttcttttgagaaaaataaagatgaagaatttaaaaaaatcaaagatgtaatattt |
| | | acactatctgatttaatgttattcttttttagcgttaatccaacagtatcatcctcgtacaaattatctaaatcaatgatcattattaatgattatttgaaagggatttcaagtgattatagt |
| | | aatatttttatgacatcattggtaaatactgctgaaaatatcaattttggtgataatgacaatggattatttatagatgattttatatccattgaaaaggtcaatttaattttggcagcaac |
| | | gttttttggggataaccacctggtaagtgaatctttttttgatgggattttgcaccaaaagaaattagattactttacaatcatatccttattattctatttcaggaatagaaattcatttca |
| | | ggcacttaagagtatagttgaaagaaaaattatagaattactatgtccagatatggatttgttacagtcttcggagaaggcacatttatttttggatgtaatgtcttgtccatttgtatc |
| | | aataaaaacaagaagatttatatatataagatatctaaagtcttttgagccaaaaaatctaagaacccactctgagattgagaatgatttgcaatcaatgctccaatgctactggttt |
| | | gtcaagtgggatgagttagatcttttaaagatgatagagaaaaaagaattgaaggaaacttattgatctgataaaacattaatgtggtcagtttcgaaatacttacgcattattggt |
| | | aagataaaatcttatgttaccaataatgtgatttcgctagatttggaatcggcttaactgcttaaacttatgctaacagaattgcttaagacctaaccattctttggaatgagatggg |
| | | gcttccaggtccagttgagagtagtcactta (SEQ ID NO: 374) |
| 7 | RT | cttgagtttgcgtaagataatttcgtgaaaattaaagcaattaatataaaaaatgtaattactagtgtgtacagatatgaaaaatgatagttataaaaccatatgaaaattgaagaaa |
| | (UG3) + | gagttcaatttttgccttgtcagtaacaaataggtagcttattgaaaaaagataaaaaattaacaaaaaatcaataaattcatatagaataaaaatattaaagaaatgaaataagtg |
| | RT | tttgcttcatcagttttagggatacattaaagtggttgataaagaaaaatattatactggattaataaaagatataaaaatagtagcttatgcaagattcaataaaatacgtcgtttaa |
| | (UG8) | agagaaataattttttaggattgttatctatttcggtagtttctatcttagttattatattatcaattgtagaaaaaatttataatataaaaacaatgagtttaattccattgtttgaaccaaat |
| | | atagaaatatggttcttttgtatacttgcttcaataattattctttgtatatctattgcactctctactatgaagattgatattgaaatagaaaggttaaataaaagtgcagttgaacttaat |
| | | gaagtaaggcggaaaattgaatttaatattgagaatagtaattatcaaaatagtacattgtttgataaatatcttgaaataataaagtcagacttaataaatcatgatgaggttgatta |
| | | taaaataaataagtatttagtcagtaaagttggtagtaagtttgcttattatcgaatgtattttattgatcagaattttacatcaatattttatctttttataacatttttaagcttttcttca |
| | | attatttcaattattttgcaggtaatgttgaagtgataagacaagattttagtgtaaattccctgttgagaatcacaactaaaaatgaaattgttaaatttaacttgggtcgtaataaggaa |
| | | gagtatgctattgcattatctcaagtttctaattatctattagagggcaatgaaataatagataatttaagctgtagaatagaaagaaataaagttatatttagtactaattcaattaat |
| | | actttttatgctttaaaaaaaatttctaaagatttaagccgattgtataaaattgagcctcctaatagagatgatatttctgaacaaatttatagaatttttgaacactctacaagctata |
| | | gtattgtaaggttagacattaaaagtttttatgaaaatattcaatataatgaggtaattaaaaagctggatagagataaaatactagttgcaaaatctattaaaattcttaaggatttat |
| | | ataactttattgataatggtttaccacgaggtttatctataagtcctattttgtcagaaatatttatgaaagaagtcgatcaacaaattagaaatatagatcatgtatactattatgctag |
| | | atatgttgatgacataatagtaatttcaacagataagagtgattctatatatgaaaaaacaattaaagttttagagaaatatgatttaaatgttaatagtaagagatatataaaaaata |
| | | ttcctgctgtgaacaataatgaaatctcaactttatataagtttgattacttaggatataagtatattatagatacaatttcatataaaaataaacgaatagttaaagcggaactgtca |
| | | gatgataaaaaaagaaaaattaaaactagaataatacatagtcttttagatagagtttataatacaacgcattatgatcgggaggagttgttaattaagcgattaaaagtgttatcc |
| | | tctaactactcaataacatataatgaattgtcaaaaactaatttaaaagctggtatgttttatagtcataggttagtaaataattatggtatttttagtgaatttaataaatttttatctaaa |
| | | gctatctactgtcaacaaaacaatttctttggtaaagctatgtcgcagattcctagtaaagaaaaagaaaatattattaaaagtatttgttttgttagtggatttaaagataaaaacttt |
| | | attgagttagagagggttgaaatggaacgagtaaaaaagtgttggaaaaataaacgatataagaagctttgaggtaaaaatgaaaagtaagatttatttagataaaaaggatttt |
| | | tatagagtattgttaactgatgtattaccctatgaagtaccttttattttaagtaatgaaggtttttatagaaacttaaaaagcaactcatttcattcagttactaaaaaaatattagaatt |
| | | aactttatttacttcacaagtaaacactaatccttttaattttaaaatctctaaagatgatagtaattttaggaagttatatttagttcacccaagttcacaaataaaaatatcaaatttata |
| | | taaaaattattatcaattaattacgcatttgtgtagtagaagttctttttcacttagatatccaacttatgttgcaaaagctttttatagtatagaaagagatagatctaattccgaaaatt |
| | | ataaagatgaagatattgaattactgtcacaaaaaagccctaaatatgcaagtacttattttgtatataaagatatcagttttttatataaattctatgattcttatagatttcaccgtatt |
| | | gaaaaaaagtttaataaactattaaagtttgatattgctaaatgttttgactcaatatcaacatttcaattacctagatcagttaataaaaattgtagctttgaaagtcatacagatatac |
| | | atagttttgaacatttattttcttcaattatgaaaggtgcttatcatggtaatacacatggtattgtaataggaccagagttttctagaattttcgctgaaattttattgcaatctatagatg |
| | | tagcaataaaaaataagttaagaaatgaaatgggaattaaggagggtgttgattatgttataaaaagatatgtagatgattattttttattttataataatgagcaaacttcaaatttaa |
| | | tttttgaatgtattgttgaagaactttctaagtatagactattttgcaatgaatcaaaaagtattaggactactattccttttattacaggtattactattgctaaacatgaaataaggaa |
| | | gagattagaaactttttttgaattatttgagtcaataaataataaagatgattatattgggctaaaattaaatcattattataaaatatcaaatcaattaattagtgatattaagtgtattgt |
| | | ttttaataataatgtaagttattcaagtatttctggttatttttttactttaatgaaaaatcatgttttgcatataaaaaatagtttttcttttgaggataaatctaaagttgaaaatttaagt |
| | | aagttatttcttattattcttgatgtttcgttttttgtttactgtatgaattttaaagttagaagcacatatttaatttctcaaattatagttttgattagtactattgctgaatcatttgatt |
| | | taaatttgatagatttaattaataaaaaaatatatgatgaggtggatttggttttaaagataaagtcaaattcaaacttattgaataatattgaaattttaaatctattaattgctgttagaga |
| | | tattgatcttaattatcagatcttagtagatgatcttatgttattgttttcttcagaaaggattaataagtataattatttctctttaatgacttttttattttatgttcaaaggaaaaaacag |
| | | tatcagcctatcagagatagaatttatgcaataataattcaaaaatttaatcagaataatctaaatgtctcaaatgattctgagttaattcacattttttttgactcacttagctgtccttatt |
| | | taactaaaaatcaaaaaattaatataactaactctgcattaaattctattattaaattaaatgataatgaaattgatgtttttgtagaagaaatgagcaaaactaattggtttattgactggaa |
| | | cttgcaaacaaaagatgcaattcagcgtttgctgatgaaaaaagaattgaaatcaccctatgaaaattgagataattaagctagaaactagatatacctccgacatttgttggttgatt |
| | | ttacacactatataactcctagtttctataaaaggatgtttctaacatccttttattttttttgagatttaatttttcttttagtgacaactaagttttactataactaatagc (SEQ ID |
| | | NO: 375) |
| 8 | RT | aattccccgaaaatccgcccgtttttactgaaaaaagccatgcatcgataaggtgcatggctttgcatgcgttttcctgcctcattttctgcagaccgcgccattcccggcgcgg |
| | (UG15) | cctgagcgtgtcagtgcaactgcattaaaactgccccgcaaagcgggcgggcgaggcggggaaagcactgcgcgcaagctatgtgaggtgatgtgtaatacatatcacg |
| | | aatagcgtaggtagctgttggctttgcctgatcaaggtgacagtatacatatcttaaaatataaatatttatgattatttatttgaaagaggttgaataatgatttttgatgaaaaaaga |
| | | catttatatgaagctctgctgcggcataattattttccgaatcagaaggggacgatttcagaaatcccaccatgtttttcttcaagaacttttacaccagaaatttgtgaattaatagt |
| | | ttctaatgagccggggaaaagaaaattacatggatacgattgtgtcgaatactcatcgactaggtataataactttcccagagtattatccttaattcacccaagagcatatgcac |
| | | agttagcaaagcatttgtatgagtcttgggatgagattcgaaaaatcaaagaaaataaaaacagtatgattaaacctgaaatgcatcctgacggtagactttttatcatgaattat |
| | | gaggatgcagaaacaagaactgtaagggagttaaacgatggatttggaagacgatttaaagttaaaactgatatcgcaggatgttttaacaatatatattcacactcaattcctt |
| | | gggctgttgtcggtgtgaataaggcaaagacatcaatgaataagcataaaaatagccaagatgttcattggagtgatagattggattattatcaaagacaaacaagacgaggc |
| | | gaaactcatggtgtccctgttggacctgcaacgtcaagtattgtatgtgagataatattaagttccatagataatattcttgagaataaaggattcttattcagacgttacattgatga |
| | | ttatacatgttattgtaaaactcatgatgaagcgaaagagtttctccatgttttaggtactgaactttctaagttaaagttatctctaaatttgcataaaactaaaattaccagtcttccc |
| | | agtacattgaatgatgattgggtgtcgttgcttagtattaactctccatccaggagagtattcaggaataatgactcggatatattatctgcatctgaggttataagctttttggattat |
| | | gcggtacaacttcatctgacgaatgggggcggtagtatattaaagtatgctatatctttaattattaataaagtagatgaggcgtcagcaagagagatgtacgactacgttttaaa |
| | | tctgagttggcactatcctatattaattccatatttagatgtattgcatccaaagattaacattaatgatgaggtcaggttaaaacttaatgaggttttgaattcctgcatagataataa |
| | | gttttctgatggcatggcttgggtgttgtattattgcttaaaatattccattgatattgacagttgtctcattagtaagatttttgaaaacggtgattgcctaagtatttgtattttggataa |
| | | aactggaagatatgataaggaaatagaagaattttctaaaaatataatttcattggattatttgtatgaggttgataaatattggatattgttttatcagcgattctattcagggaaagg |
| | | atataatccttacaatgatgattgttgtttcgatataatgaaaacatatggagttaattttatgcctgatgatggttatcaaacgaaagctgaacactattgtaatatagtaaatagtcc |
| | | atttcttgagaatgatgaacaagtaataagttttaacgattattgttcataatttataattagcctccg (SEQ ID NO: 376) |
| 10 | ATPase + | actgctcgacaaaacgaaccgttcattcgcgaggatggtggcagtgaatgaggtggtcagttttatcagcgcttcaaggtagctttataggatggattgtagcgaagtgccca |
| | adenosine | acaaattgattgaagctaagggcattgagcattgcatgcatcatgctcagactgacaaaaaatcaaaataaatggattgatacggacatgacagacagcgtacagactgaaa |
| | deamnase | ctaccgagggaaaaatcatcatcaacttgtttgctcccaatcttcccggaagtaccaaagaagatgatctcattcagaaatctctgcgtgaccagttggttgagagtatccgaaa |
| | (RADAR) | ctcgattgcttatcctgacaccgataagtttgctgggctaacacggtttattgatgagtccggccgtaatgtattttttgtggatggtactcgcggtgcgggtaaaactacttttatc |
| | | aatagcgtggtcaaatctctgaacagtgatcaagatgatgtcaaagtcaacatcaagtgtttgccgaccatcgaccccaccaagttgccgcgtcatgagccaattttggtcact |
| | | gtgactgcccgtctgaataaaatggtgtccgacaaattaaaaggatactgggcgtcgaatgactatagaaaacaaaaagaacaatggcagaatcatcttgcacaacttcagc |
| | | gtggtttacatctgctgacagacaaggaatataagccggaatatttcagtgacgctttgaaactggatgcccagcttgattactccattggtggtcaggatttgtcagaaatcttt |
| | | gaggagctggttaaacgcgcgtgtgaaattctcgactgcaaagccattttgattacttttgatgatattgatactcagtttgacgcgggttgggatgtacttgaatctattcgtaaat |
| | | tctttaacagccggaaattggtggtggtagcgacaggtgacttgcgtctatattcccaattgattcgcggtaaacaatacgaaaattacagcaaaactttgctcgaacaggaaa |
| | | aagagagcgtccgcttagcagagcgaggctatatggttgaacaccttgaacagcaatatttattaaaactttttccggtacaaaaacgtattcaattgaaaacaatgttgcaattg |
| | | gtcggcgaaaagggaaaagccggtaaagaggagatcaaggttaaaaccgagccaggcatgcaggatattgacgccatagatgttcggcaagcaattggcgatgctgtta |
| | | gggaaggccttaatttgagagagggatcagatgctgacatgtatgtaaatgaactgctgaagcagccagtgcggttgttgatgcaggtgcttcaggatttctatacaaaaaaat |
| | | atcatgccacatcggtaaagcttgatggtaaacaaagcagaaatgaaaggcctaatgagttatcagttccgaatttacttagaaatgccttatatggctcgatgctaagcagcat |
| | | ttatcgtgcagggttaaattatgaacagcatcgatttggtatggattcgctctgtaaggacatttttacctatgtaaagcaggatcgtgattttaacactgggttttatttacggcctc |
| | | agtcagaaagcgaagcattaagaaattgctctatttacttagcgtctcaggtgagtgaaaactgtcagggcagtctgtcaaagttcctacagatgcttttggttggttgtggctct |
| | | gtcagcatattcaaccaatttgtgaccgagttagcacgagctgaaaatgatagagaaaaattcgaacagcttattagtgagtatgtagcttatatgtctgttggcagaattgaaag |
| | | tgcctcacattgggctaatcgatgttgtgcggtggttgcaaacagccctaatgatgagaaaattggtgtttttcttggcatggtgcaattaaatcgtaaatcacgacaacacatgc |
| | | ctgggggttacaaaaaatttaacattgatactgagaatggcctagcaaaagccgcaatggcgtcttccttgagtacggtagcttcaaataatcttatggatttctgtagtgtttttaa |
| | | tctgattggtgctattgcagatatctcagcatgccgttgtgaaaggtcagccattactaatgcttttaataaagttatagctcagacaacatgtattgttcccccatggagcgaggc |
| | | tgctgttcgtgcagaaatgaaaggctcaagtaaaagtgcagataacgatgctgctgttttggatgtagaccttgatcccaaggatgatggcgtgattgatgaaagtcagcagg |
| | | atgacgcaacggaattttctgatgccattactaaagttgagcaatggcttaaaaacgtaaacgaaatcgagattggaattcgtccgtcggcacttttgattggtaaagtatggag |
| | | tcggttctatttcaaccttaataatgtagctgatcaacataaaaccagactctatagaaatgcagagcatggacgaatggctagtcaatcaaatgccgcgaaaattatgcgtttta |
| | | atgttttagcatttcttcatgcggtattggttgaagagagtttatatcattcggttagtgatagggaatatatcggtgaggggttaagactaaatccagttacttcagttgatgagttt |
| | | gagaaaaagataaaaataattggtgagaaattaaaagcggataataaaacatggaaaaatacccatccattgtttttcttattaattagctgtccaattctacatccgttcatttttcc |
| | | tgttggtgggattaattgttcagtcaaagcactgaacaaagaaacaagtttcaataagctgattgatgaaattgttggcgataaattactttctgatgaagaatgggactatctgac |
| | | taaaaataatgatcaaaaaacaaacactagacaacaaatttttcaaaatactataacatcgctgaattcctccacaatcgtcggagcatcatacgataaggatacaccagccag |
| | | gaaaaccaagtcacctttattaggtgatagcgaagaaaaatgataatggccttcgtataaggattgggtatggaaaggtttcttcttaactcaacagttctgttatataggctaag |
| | | cacagtctctttggatgaggtatcacttgatgagagagtggagtcatctgtattccttgctcaatacgaacaggctcgtagtttacctgatcatgtagctaaatctgcttggtcatat |
| | | ttagtgcaacaaatcaaacagcggaatatgaaactcggcccagtagcaatcttacgcctgatagctgaaaagtttattaaaaacgagaaaggtggccccaaaatcgatctac |
| | | ctatgttctcggaatggcaaacgctgatgagtcgagtatcgtgtctaccaattatagcgtgtcatcaggtatttaatccagggccagccagtcaggaatatagttttcgctggcct |
| | | ttatacccatatcacccgacggttgaagactacattacccgtgaatgcttacatgaaactcaccaacacctaaatggcagtaccagtgcagaagagtgttggctggatgcact |
| | | caaacacccagaagcatgcctcagagattttgagaagggctgggcatctcaagagatgaaacaactctgcgcccagattgatccatctctgacacctagaatcttcaaggat |
| | | cgtttgcaaatcgcctgtaatattcgcgaaattctttgtcgggttgctcagggcgtggaattgccagagtggatagcatcaatgcaaaatccgcagcaactggcgaatagcac |
| | | aattctgcataatggccgggagtatgggtttgcgacagtttggccaattgacgacaaatacagtcaggagtctgagttttgctggctaaccggattgttggaaaaatggcggttt |
| | | aatgcgccagaagggttagaacgattgctttggatttacctgctgattcaaaatcagtacttgaccttactggttcagcgagacgattttttcggatttgaacagttccagaattac |
| | | accatgacggagttgagggaggaaacagagaaatcttatttgtctcgttttaaacatgctcatggtgcaggagtgtattctcaggtgcgttatctggaaggacgttttgctccga |
| | | agagcgaccccaacaaaatgcaaaagctgctcttcagtgtgttaagaggatattgggaatatctgagtgctcatatgtccatggaatgggtgcatgaaaagcctctgactatat |
| | | cgcaagtgctcgataacctcgaactggttgaacctcatggcaagtgtgtagagctggcgctagtgccgcactttatcaaaagaaagcccaaaaatggtgaggcctatcctca |
| | | cgcattactattcaaagacctgaaaaatcaggcagctattctgatggacatgctgaagtctgaaccgcgtctgacaggctggattcgaggagtagatgccgcagctaatgag |
| | | atgcacgcaccacctgagttattttgccccttgttccgggtactagccaaatcaggtattgctcattttacctatcatgttggcgaggactttccgcatctgatcagtggtattcgct |
| | | ccattgatgatgccttgagatttttaccattgcgtaatggcgatcgtcttggtcactgcacggcgattggtattacacctagcatctggaaacgctctttgccattgtccttatccat |
| | | gaccaaagagacgagattgctcgatttggtgtttatctggcgggaacttcgaagtcatccggaactgctgcgttacgctagtgatgcagcgattgaagctgttcgcttggctca |
| | | taaagtgttttcgctggaagaggaagtctcgattaccacccttgatcaggtatttgaaatgcgggggctgttggccgaatcggaaggcctactgagtgagctaaatgaaccatt |
| | | aaaacccaaatccctctggttggaagagtatgagcgcgccagagagttggttaaaacaacgggtatgaaaaggccgttgaagttgtataagcaatggctaacatctgacaat |
| | | gtgcgaaagcagcgtgctgaatatgttgaagttgccctagaatatttgccggatgaagcagttgttgcattacaacaagctgtaatggcaaaaatggcagaccgaaacattgc |
| | | gatagaatgcccaccgaccagcaatacacgtatcagtcagtaccgaaacgtcagcgagcatcatatctttcgctggatgggcttgccgggtgaggcgattgaaggtgatgtt |
| | | cctatgtctatttgccttggctctgatgatccggggatcttcgctgcggacttgaaatccgagttctatcatctgttcgttgtgttaacccgaaagttcggtttgtcgccagcagatg |
| | | ctttgagaaaggtagctgaggtgaacgagaatgggcgcatttatcgctttcatgatgtcagctagcctgtatacattgaggattctgtaattgttcaagaccagcagtgctcattg |
| | | ctaactatctat (SEQ ID NO: 377) |
| 13 | STAND | aaatctctttcgcgtcaatagtggtaatatttttttatcattgtcctctttctactgacatactgattgtccgacagtggagccagtcgaaattgttgacagctagtcggggctcgtct |
| | | ggtctttctagcagtaagaaacgtattaatattggatcgccactagtttaacagatacctcagaattatttatagactgacaccaccccggcagacgatcctgccctataggaag |
| | | ctaagtggaaacttatccagtaacagcttgtcgattttatcccagagggtgttcctcaggatgtatcgctgaaatcaaatccagcactaagaatgaggggtgagaaaccatttcc |
| | | ttggtgggtctttgaccatttctgttgaactaatgtttttgggttatcaaggatacaaattcaaggcagtgtttcactaaaccttacctcgcttcaataccaatacatttttaatgggtat |
| | | aatatgtgactgcttttgccgcattattgacaggaacaaggactggtgatgaatattgatttcagtttaattcgtagcgcccccaaaagccgtaacgatagctttgaagcactcgc |
| | | cgtacagttatttaggaaaacctgtcgagtaccgacaaattcaacatttattagtctgcgtggagatggtggagacggtggcgttgaggcatatttccgctcaccggacggtgc |
| | | cgtattcggtgttcaggcaaaatactttttccagcttgcttccgcagagcttacacagattgatagttcccttaaagctgcgctaagcaaccatcccacactaaccgaatactgga |
| | | tttatataccgtttgacctgaccgggcgtgttgctgcgggaaagcgaggaaaaagccaggcggaacgctttgaagaatggaaaagtaaagtcgaatcggaagcgtcagcg |
| | | aaagggaagtcactttctattgtcctttgtaccgctgctgttatctgcaatcaattacttgagatagacccttacggagggatgcgcaggtattggtttgatgacacgttgctgaca |
| | | acagctcaaattcaacaatgtctggaggacgccattgcttttgccgggccaagatatacttcaatgctggatgtggtgacgaatgctcatgtcggcctggatttctttggtggga |
| | | ctggtgacttttgcgagtggtacgaaacatcattaacaccaatcgttcgagagttccattcactgaatggatacggacgcaaatcgctggatatactcggcgaaacccgtgcta |
| | | catctgccacggcattgattgaagaaataattgcctactgtgagagcatgagagataacaatgtcacggccacatcggttacagatctttccgtcgctctgtcatccctattgac |
| | | acttttcgctgatgcccgccatgctcaagaagataaattttatgaaaagcatggcaagcatagtgatacagaatcgttccgacagttccacgcagagtatatgtgtgcatttcct |
| | | gccggagatatggatgcggcgagaaaatgggaagagcaggcgcagcaactgcaaaatttgctgacttctcaggtcattggtgccgcaacagcacattccttactgctggtt |
| | | gggccagcgggtatcggcaaaacccacgcgattgtcagcgcagcattgcgtcgactggaacatggtggtttttcactggtcgtctttggagacgactttggcaaagcagag |
| | | ccttgggaagtgctacgcagtaaaatagggctgggtgccgccatcgatcgttcgacattatttgaatgcatacaggcctgcgccgaacatactggcttaccttttgtcatttatat |
| | | cgatgcattgaacgaaagcccgcgagaagtgcgctggaaggacaagcttcccgaattgctcgctcaatgcaagtcttatccagacatcaaaatctgcgtttcaacccgagat |
| | | acctatcgcaatcttgtggtcgattcacgctttccagggtttgctttcgaacacatcggtttttcaggacatcaattcgaagcggtacaagctttcgcagcctactatgagctggat |
| | | gcagagattacaccacttttttcacccgaactcggtaatcctttatttttacacttggcctgtaaaacgctaaagggcgaaggccgtgacagtctggatatttctttgccgggtttta |
| | | cctctctgtttcaaggacatctcaaacattgcgatgttttaattcgagaacgcctccactacgcaaaccctcgtaatctggtaagggctgcaatgatggcactcgcgaaaaccct |
| | | gacacatgagttgccgcagaaccgaacgtgggaaacctgttgcgaagcactgagcaaaatagtgggaactgagaccacacctgaatcctttttaaatgcattggcacatga |
| | | aggcctcattatcctttctgttgtagatgaggataccttcctgatccgtctgggttatcaacgctacggtgacatactccgtgctatcagccttgtggaaactcttgattcggataca |
| | | gtaaaactagcggagaaaattgcagcgttaacagaagaagatgctggattgctggaagctcttgccgccgtgctgccagagaaaactgctcttgaaattactgctgaagaag |
| | | taggattaccatccgaacaagcccataagctgttcatccagtcattggtttggcgctcccgacaaagtgtagtggaagaaattgatgaacacatccatgcagcactgcataca |
| | | cctggattatgggagtcggtttatgaagcgctgttttcacttagtctggttcctgaccatcgtctaaacgcaactaactggctggggccatttttacggcagtcatccttagctgaa |
| | | cgtgacacctacttgtcattagctgcgctgggatcatttgataataagactgctgtctattcactcatccatgcagcactatttgctgacataacccattggcctgctgaaagccg |
| | | gaggctggccagtctaacacttgcctggctcacttcgtgtgctgaccgccgaatcagggatttatcctcaaaagggctaagcagaatcctggcaaactacccggagaactgc |
| | | caaacagtaatcagtgaatttgcatattgtgatgatgattacgtattagagcgtattagccttgctatctacagtgcatgcttattgtcataccaacgcagaaatgcgtttatgccag |
| | | cgctccctggtctattaagcattgcgtcagatagcaagaatattctgctccgggatacggttcagctattagtaaacttgttgaaaacaggagaatttcccacagccgtaacaag |
| | | ccaattacagcattaccagacaaacgtatcattaccatcacgatggcctgtactggcggatgtcaaacccctcctagatctggaacatttaccatcaaacatggtgctctgggg |
| | | agaatccatggccccggatttctggcgttatcaggtggaatcgaagatttccggctttgacttggagagcgccaatatcagccatgaaaacattgcctgttggttaatgcgaga |
| | | agcacttaatttaggatatcccggttataaccactgcgcgctcaattatgatcgccatatcgggagtcagtatggctcgggacggggtagaaaagggtatgctgaccgactcg |
| | | gtaaaaaatattactggatcgccttacatcgactactgggcattctggccagtaatgttcccgcactggaagacccatattccgactacgaacctacaagtgatcttctatggtc |
| | | agtcgacgtccgtaaagttgacctgaccgatgtacgcgatatcaccgcagaaggtgtctatccagtactgatggaggaaacaaattatgcattccctgaccacaattcagatat |
| | | caaaggttgggttaggaccgatgattttccaccttatgaagcttgtcttattcgaactgacgaggaaggagagcagtgggtagcgctttcacatagctattgggatgacgataa |
| | | agcgccgaatgaaaatagctgggattccccgtacttgggagtgcgtgcttcctactcaagcgcactcataaatgaaagcatccagaactttaaacagaaaagatcacgcgat |
| | | attttccaatataatcagggaagtagttgttatcgcggttatcttgctgaatatcctgacagcccggtatacaaacaacttcttaatagtgatgaagatagtgaagcgtttaattttac |
| | | agaagtcagtttactgcgcggaaacgaatgggaatacgactactcatataccatgcccgagcgccaggataacctcattgcgccatgcctgggaattattcaaaaactcgaa |
| | | cttttatgggattgtcaaagcggttgggttgatcattctggcaaacttatcgccttccatcaaaaaggtgtaaaacaacgcggacttttcatccatcgttcggcattgaacgcctat |
| | | ctgtccataacaggtgaagagcttatacatcgccgttttgctaacagaggatattttgatttagctggtcgtaatagcacgcaaatagacctgaaaacttggatccagtaccggg |
| | | cagacaaggcaccggtagttttacgagaagaggaactgccgtttaactgctgacaacgatacttattaagtaatcaactggctgccttggcatcgaatgccagaagagccatt |
| | | tcgcactaccaatttaagtagactgaaggaatacttggtacaagcaaacgcacgccatatcggatagaggggact (SEQ ID NO: 378) |
| 21 | Trans- | attatctgccaaccgataagatggctgcctaagtcgtagcgattcagcactgttttagcggcgctcgattgcaaagtcgtgctttgctgacttgcgattgtgctctttacgagcaa |
| | membrane | agctttcaggtatagtaagtgctaactgtagtgtaaaattatagggatagatgaagaaaacaacgaggctttagctaatctttgcagttgtgtctgctataataaggcgaaatttta |
| | ATPase | tctgcatgattttgtttgattaactccgaaagccagctctctcggtgaagattgggaagggatatcaatgagtgatgatagctataaatttcaaaagttaacgccgttcagcgatgt |
| | | tgagctgggtgtatataaaaatgcgatagattttgtttttgccaataacgatctaaaaaatgttgcgatatcagggcaatatagcgcaggaaaaagtagtcttatcgaatcctataa |
| | | gaaaagtcattcaaatataaagtttgttcatatctcacttgctcatttcagatcgattgaggaagctgaaactaatgaaccaagtaaagatataaatgaaaccgcgttagaaggta |
| | | aagttcttaaccagttaattcaccaaattaatgctgatgatattccccagacacattttaaagtaaagaaaaaaataaaaactaacaacattgtgataaacaccatctttacggtgtt |
| | | atttatcgccatgatactacatatcacgctatttaataagtgggaaaagtttgtttcacttttatctgaaggtaatataaagacactacttacattatcaactaaatacgatacgctttta |
| | | attagtgggtttatatgtactatcctatcttgtattttcatttacaagttaataaaaacccaaaagaatcgtaatgttcttaagaaaataaatttacagggtaatgaaatagagatttttg |
| | | aagaaagtaacgagtcttatttcgatagatatttaaatgaagtattgtaccttttcgagaacgttgatgctgatgccattgtttttgaagacatggaccgttttaatagtaataacatct |
| | | ttgaacgtcttcatgaggttaacagactggttaatattcaacgggacacagcagggcacaagaaatcgacgttacgttttatttacttgcttcgtgatgatatcttcatttcgaagg |
| | | atagaaccaaattctttgattatatcattccagttattcctgttgttgatagttctaactcttacgatcagtttatcacacattttgatggtggtggtattctcaagttgttcaatgaaagat |
| | | ttctacaagggatgtctttatatattgatgatatgagaatattgaagaatatttataacgaatttcaaatttattataacaaattaaacacgacagaacttgactgtaataaaatgttgg |
| | | ccattattgcctataagaatattttcccaagagattttagtgagttgcaacttaatcaaggtatggtttataccatatttagtgaaaaagacaaccttattattgaagaaataaagaaa |
| | | atagaaaaagatattagagatagaaaaaaagagattgaggcaatcaatgatgaaatactcaactctagtcaggaggttgatgctatatacgataaggaattatctagatataata |
| | | atcatcctcactataatcaggctgagaaagctgatatagcaaagagaagggcggctagaaaagaaagtgttgaaaataaatttaatggtaaaatagaagaaattaatgagctt |
| | | atatcaagatcaagagaaagtttggttgattctagaaacaaaagacttaaagaagtaataactagagaaaacattgatgaaatatttaaactcacctataccaatgaaattggag |
| | | aggaaagagactttaatgaaataaaaagcagtgagcattttgacttgcttaaataccttattcgtgatggttatattgatgaaacctataccgactatatgacctatttttatgaaaat |
| | | agcctgagtcgaattgataagatgtttttacgcagcattaccgatcaaaaaggcaaagagttcacttatcaactcaagaaccccaagctggtcgttgcccgccttcgagaagtg |
| | | gattttgaacaggaagaggcgcttaattttgatttattagcttatctgcttcaaacgccagcccaggtaaacttaataaaacgtttattcaaacaactaagaaaagatagaagagtt |
| | | gagtttattcgtggttactttgaaactgagagggctcagcctgtcttcattaatcgattaaatacacagtggcctgagtttttttcttatgcgctgacagagagtgaattttctgctgat |
| | | tgggttaaactctactctataggcacgttttattattctgccaatgacgccatcgaggccattaatattgatgattgtctgactgattacatctctgattcggcaggttatttagcaata |
| | | tcagaaccgaaggttgacaaattaattagtggttttaagttgcttaacgtctcttttgtcagtattaaatttgaaaacgcaaataaagtactctttgatgcggtttaccagcattcactt |
| | | tatgatattaatttttccaacctgaccttaatgctgagtaaggtttacacgcttaatagtgaagatgatattcgccataagaactatacactagtgatgtcacaacctgattctccctt |
| | | ggctagttatgttaataaccatattagggactatctggatatggttttatctagttgtgatggttcaatcgtggatgatgaatccattgttttatccgttcttaataatgagggaatatct |
| | | gatgaacaaaaaggccagtatataaacgctttgcaaactttcgtgacatctctgagtgaggttgagagcgaatctttatggtcatctttgttggataaagatagagcagtgtgctc |
| | | tgaggaaaatattgtctcttattttgaacatgttgatggactggatgactcacttatcgaatttatcaatagaactgatgtagacctgaattttcaaaatattaatattgataacgagct |
| | | taaaggtaaattatttaaatcgattgttatctgtaatgatttatcaaatgataaatatgaaaaattaatttgctcactaaatattatttgtaaaacatcctttagcgctagtaatatcgcga |
| | | gtgataagttcaaaatattagtggataaaaatattattcgtatgaatgttgcgccacttaatttcatacgagataactattcagagcaactttcctattatattcataagaatatcaggg |
| | | catacgttgaattaatgacgattgataactttattttggatgaggctatatcaatactttcttggaaagttgatgatgatttgaaagttaagctactcgagtttgttaaaactccgttgg |
| | | ctatttatagtaagaattactctcaggtcgttaatgactatattttagaaaataattttaaaccagatgaacttctaatcttgacgtcatcttataaaacttggggaacctctactcagtc |
| | | gctcatcttgagtcgagcaatacaggatatatcagcattgatagcaagtcctaatgatgtttctgaaccgttactaaaaaacctgtttgtcgcagagggactgaatatgcagaat |
| | | aaaatagcactgctaatcgctttgttgccgggtaaggatttgagtaagacgacttgcaaagagtatcttgatctgcttggtttatcggagttcagtaaaattttggggcgaggcaa |
| | | acctaaaattgaagttgattcaactaatcaaagtttattaacagcattaagagataaccacttcttctctgattttgaggtggataatgaaaatcccacttattataaaataacaagg |
| | | cggcgctctatgtttggctcagatacatagcattatgtatttttctacagtttgggcacttttatagtgcccaatttttacgctgaaacttacgcagataatctgactttttcccagttga |
| | | cgagtacacctag (SEQ ID NO: 379) |
| 22 | ATPase + | atctatagcagtcatcatattggattattggtgaagtggtacactgaatttgcccacctgaacagagttggttttatcaaacctgtagtttactcaatgacgtaaaaattggtgatgt |
| | QueC + | aaaggatataaaaatgtggtcagacaaagagtcatcagaagactacctaaattttggtgaagtatctcagttagccgtggatgtacttaccacgaaagatatgttaccagtatct |
| | TatD + | atcggaatttttggaaactggggggcaggtaaatcctctctgttaaaactgatagagcaaaaacttgagcaagacgacaaagattggattgttatcaattttgactcttggctcta |
| | DNAse | tcaggggtacgacgacgcccgtgccgcacttcttgaagtcatcgctacagaattgacaaaagctgctgaaggtaattctacccttatatcaaaaactaagagactccttagtcg |
| | | agttgatggttttagagctatgggattactagctgagggtacagctttaatggcaggattacctactggcggtttgctttctagggggattggtgcattaagaaatatcaccgatg |
| | | gcatccagagccaggaagagtatgaggctttaggcaatatagctaaagaaggtaaagaaactgcttgtggtttgattaaaccacaaacaaaaaaaagcccccctcagcaga |
| | | ttgatgcctttcgtaaggaatatggggaaattctagaagaacttggaaagccactcattgtggtaatagataacctagaccgctgtctccctgccaatgctatccatacacttgaa |
| | | gctatcaggctattccttttcttgactaatacagcctttattattgcagcagatgaggacatgattcgctcttctgtggctgattacttcaaaggggcatcacagcgccatcaaata |
| | | gattatctggataagctaatccaggttcctattcgggtgcctaaggctggggtccgtgagatccgttcgtatctgttcatgctttatgccattgaacatggcttagaaggcgaaaa |
| | | aataactatgctccgtgagggcttagagaaggcgttacagcaatcctggaaagatgaaccaatctcacgtcaggaggccttaaaaatgactggtgaagcggatgatagcaa |
| | | cctcgcgctggcgtttgcgcgtgctgaccgtattgctcccattttagccaactctccaattattcatggtaatcccaggatcgttaaacgcttgttgaatgttgtgaaaatgcgatct |
| | | caaattgcgaagcgacgagcaatgcctttggatgaagcaattattactaagctagtaatttttgaacgctgtgttggagtggatggcaccgctgatttatatcatctcgtggatatt |
| | | gaacaaggtgttccccagatacttaaacagcttgacgataatggcggtcaaatacctactgatgcaccaaagacatggactgatagtccaacgactaaatctttcatcagtcaa |
| | | tgggcccaacttgaacctcgtcttggtgggattgacttaagggccgccatatatctgtcccgagaaactatgccaataggtgcatatgtggttggtttatcgccatctggacgg |
| | | gaagtactaaatgcactaattgaattgaaaaacactagttctcctacagcagaaaaccttttgaaagcacttcctcgtgaggagcaaatacctgtaatggaaggtttaattaacc |
| | | agttacggcaggtatcagattgggatcgtaagcccagaggcttttccggcgcatgtctgttggcccgctactcaacagatgcagccagcatattaattcgttatctacaggaatt |
| | | acagttggggatgaaacgaccagcgtggatgactgcagcattaaaagatgaacaatggaataaggacgcttaatgggaacatcacaatcaagtaaaggtccaggaggtgg |
| | | ctctccgctggttccaccatgggctgatgatcagccacagcaaccgttaccctcgccgcaagaaaggaggtttgcgccatttcgagaatcgttgggaaatgcggtatcaaat |
| | | ggaaatcgagcagatttcagaaaagccatagggcactacgcgcgaaaagcctccggagggagcagtaacgctgctcggcgattagggagtgtcacgcaagctggggcc |
| | | gaattatttggggctttagtgggaatgccttcggctcccggagaaccaagcatcgatttgggcagtttggcaggccttccatgcgaaatagcaatatcaactattgctcaagctt |
| | | taacatcacaggatggtgactcagaaaagatctgtgcggccatgaaccatgctttagtggaggctcttgatggcgtagaaattttcgatcctcaaaaaataactgatggtttgat |
| | | tgttgacacaatgattggttatctagcggaaagtattttccttcagatggtaatggattctaatagggcatggaacaaagcagatacaccttcaaaggcaattcatgcagaaattg |
| | | aactccgggaattgattaaagttgttgttgataaacatatggcaccaaaacttgccggtaacataagatcgttcacacgaaaccaaatggtaaaaattgaacgtcaggccattat |
| | | tgaggcctggcaagaatgggaggcataccagtgacacaattagttttccatcataaacatcaccatttgccgccagcaagtgagaaagtgttacctgttcagctatatggatta |
| | | agtggtcagaggcgcggagatatatctgttatcgggaatcctgcgattgatcggatcagacgtttgggagtacagcttccagctaaggtcatggattttctgagtgttgcattag |
| | | cagtaactgcagcagatactttcgttcagcgtgaaagttccgaggatggttggacccgccaattgtcgttacgactcccccttcatgaaccatccagatggattagtctaaaga |
| | | aagaacttgagagtgctttgcattttcttagtggagacatctgggatttcgaattttgtgacgatggttatgcaccgccagagccttatagccagcattcaaggcatcgtctgatta |
| | | agctaaaagggcttgactgtgtcagcttattttcaggaggtctggattcagctattggtgcaatagatcttctggctgcagggcgcgctccacttttggttagtcatgcttataaag |
| | | gggataagtctcgtcaagatcagattgctgaaaaattaagtggccaattttcgcgctttgagattaatgctgacccacacatttatcaaggcgtgactgatattacgatgcgaact |
| | | cgtagcctcaattttcttgcccttgcggccgtaggtgcttgtgccgtacaagagatatctcaacaagaaaagattgatttgttcgtacctgaaaatggatttatctcattaaatgca |
| | | ccacttactccacggcggataggttcgctgagcacacgaacaacacatccacattttattacgagcatacaaaagatctttgatgcgctcggtatttcttgtcaaataatcaatcc |
| | | atatcagtttaagacaaaaggaaaaatgatctccgaatgttcaaataagcagctcttatctaaaattgtggaaagtacagtatcctgcagtcattggaaacgaatggggcagca |
| | | atgtggggtatgtataccgtgtatcattcgacgagcatcacttcatgcagggggaattagtagagatgttgaatatattttccagtccttagctaaagtaatgaatgaaatagatc |
| | | gcagggacgacctgatcgcccttaggattgcgatcacgcagaaatcgactttgaaaataggtacatggattgccaaaagtggccctttgcctacggcagaatttgataatttca |
| | | agcaagtatttaaggatggcctagatgaggttgaaagctatttactgagtgagaacatagtatgagcatcgatatgcactgtcatctagacttatatcctcggccagacctcgtg |
| | | gctgaagaaagtaaacgtcgagggacttatattctgtcggtgacaacaacacctaaagcatggcatggtacttctttattggctaaagaaagtcaacgaatccgaactgctctt |
| | | gggctacatcctcaaatcgcgcatcaaagatcgcatgagttagacctgtttgattcattgctttcggaaactaagtatgtaggggaaatagggcttgatggtggacagggattta |
| | | aagaacattgggatattcaattgaaagtgttccgacacattctcaacagtgtaaatcgggctggtggcaagattatgactatccatagtcggggaagtgcatcagcggtgcttg |
| | | atgagattgaaaatatcgatggggtggcaatattgcattggttcactggaacacctaagcagcttgaaagggcaattgatttaggatgctggttctcagtggggcctgctatgct |
| | | cgatacaataaagggtaaggccttagttttgaaaatacccaaatcacgcattcttacagaaacagatgggccatttgctaagtttcgtaatgacccactaatgccatgggatagt |
| | | gggattgcagagaaacagttagccgcattatgggggattagtcagatggaggttaatgctcagctagttgataattttaaggtattatgtacatcataagaatgaaaaacttagat |
| | | atgcatttacagttcaattcatttttcgtcatcagttaattacacataaaattaaaagtaagaatatatctaccctgtgaatgagcaaggcggatttatatagtttgtaattagtttaaat |
| | | gtaagcagttcgtcagagtgcgtattccgctctattcgatcacggattggccgttatgaccc (SEQ ID NO: 380) |
| 23 | DUF4011- | gctatcctacctcagattactgggctgacctaatctatagatcaggttctctttatactttatgttagcgaaatactaagatgcttcttagtgacgacctcttgacggtagaggacgc |
| | helcase- | gtgcatagattttacaatcactgcctttcgccccctaacctaatccgcgaatgatgcatcctgaacttgcgcgccagttcttatactcgccgtcagagcaatcaaattgctgatgc |
| | Vsr- | tttctgcctgttcaaggcatctcctgtcgtcagcaatactgtgcatatttgattgatttcctcttaaggagaattagtttcatgggtattaaagcgcaggtgagtatcgcgcacaagc |
| | DUF3320 | tggggttcacatcacaccaaaatgcagttccgctgttacgtgagcttatcttgcataatgagtccgaagagacatttcaggatctgacactgcatctgaggaccgtgccagctg |
| | | tgctcgaagaaaaaaaatggaatatcgatcgcctgcttcccggtacttcacttgatatcagagatcgggatatcaaacttaatgctgaatggctagccgaactgactgaaagc |
| | | gtactctgcgaagtcacgctaagtttgcgccagggtgaggaagaactcttcattacccattacccgcttgaggcactggcgaaaaatgaatggggcggcagtgcaatgattg |
| | | aattgctcccttcatttattattcctaatgatccggctgtggatcgtgtactcaaggcaacctctgatgtccttcgccgtgcaggcaaggatgacgctcttaatggttatgaaagca |
| | | agtcgagaactcgtgtctgggaaattgcctcagctctctggactgctgtttgcaacctcaatatcagttatgcccttcccccagccagttttgaacgcaatggccagaaaattcg |
| | | cactccaggagccattctggaaggaaaagtcgcgacctgtctggatacaacattattatttgcttcagcactggaacagattggtctgaattcactgctaatgctcagtgaaggt |
| | | catgcgtttgctggtgtctggttacaaccgcaggaattttcgcagctagtgacagatgacgtctctgcggtgcgcaaacgtgtcgacctgaaagaaatggtcgtatttgagaca |
| | | actctcgcgaccagagctcacccgccttcatttactcaggcatctgatgaagcgttaaagcatcttaacgaggatgtttttcacgcagccattgattcccgtcgcgcgcgtatgc |
| | | agaaaattcggccactggctctggggggcactcgccttgaagaccagtcggatgcctgcgaggttattttgcatgggtttgaggaagccccctatatccccgatgttgatattg |
| | | atatcgagacaactggcgaaaaagaagccggggggcggctggtacagtggcaacgaaaacttctggacttaaccacccgtaaccgcctgttacacctgtctgaaagcgct |
| | | aaaggcattcgtttgatctgtgcgaatccgggccatcttgaagataaactggctgaaggcaaacgcattcgcattgtcccgctccctgatctcgaaagcggcggccgcgatg |
| | | ccgaactttatcagcagctcacaaatgagaacctgcaggaagaatacgctcagattgcgctggaacgcggtgaagtcgtctcctcaatggaaaaataccgcctcgagtcatc |
| | | cctgatcgacctctatcgaaaatcgaaaagtgatctcgaggaaggtggtgccaacactcttttcctcgctgttggcttccttaaatggaaaaaatctgctgatgaccccaaaagt |
| | | tactctgctccactgatactgctgccgattcaacttgaccgtaaaagtgcactttcgggcgtgaccatgcgtttgctggaagaagagccccgcttcaaccttacactgcttgagc |
| | | tgctgcataatgactttgctctgacaatcaacggcctcgatggtgatctacccaccgatgaaagtggtgttgatgtggatggtatctggaatatggtacggcgtgctgtacgcg |
| | | acatacccggtttcgaagtcacccgcgatgtcgtgattggcacattctcttttgccaaatatctgatgtggaaagatctcatcgaccgggcacctcagctgatgcaaagtgcgc |
| | | tggtaaagtatcttatcgaacgcggccaggaaaatgccgttctggataagagcggagaagtcatcaacgctcatgaactcgatgacaacatcaatacgcaggatcttttcttg |
| | | ccgttgcctgcagattcctcgcaaatcgccgctgttgtagcctctgcaaaaggcagggattttgttctggatggcccacccggtaccggtaagtcgcaaaccatagccaatat |
| | | gatcgcgcataaccttgcgctaggcaggcgcgtactttttgtcgctgaaaagaaagcggcgctggatgtggtctatcgtaggcttgaggcccagggactcggtgaattttgtc |
| | | tggaactgcactcgagcaaaacgtccaagatggattttctgaaacagctcgagcgggcatgggatgcgcgtgatctactaaccaccgaggagtggaaggaagaagcggc |
| | | caaggtgcagcacctgcgtgacaaactcaatgaggttgtccgtttgctccatcggcgctggcccaatggcttaacactccatcaggcaatgggcacagttatcagggatgca |
| | | agtagcgccacgccgcactttagctggcctgcatcgactttgcattcttctgcagagatgacacagttcagagagatagtaaaacgtctggagctgaaccgtgatgcatggaa |
| | | acagcacggcgatcattttgaactcatcgcgcaggctgactggaccaatggatggcagtcctctctcattgctgcagcaaactcattgcctgcaaccatcgatcaccttgaag |
| | | acgcgaccgaggcgttactgaaggcgacgggagttactctgctctctaccgagccggagagactgtcgcagttaacttcattctgtgaattattgtcggaagcttacggcatt |
| | | gatctgagtttcatgttcgcaccggatgccgcaagccgtatagagtcagcgaataaagccgttcacctcctgaaagagattgaagcgacaaaggctaatctgtcagttaccta |
| | | cccttgtaacagttggcagcacgttaatgtcccacagatcagaaacgcacttgacgtcgctgacaaaaaattctggttctttgcgaccagtgcccgcaagaaagtcattggtg |
| | | aagttatccgacaacactcgctaacgtcagcccccgacttatccgttgatctccccattgctgaaactctgcagacattgctgcaacgtctgaccgagcttaactctgctactgt |
| | | atctctgccgggatgggttggactggataccaacgttgcacagttgcagaccaccctgcaacttgccgaatctatccgcaattcgcttggtggtttcgcttcttcgccacagca |
| | | gttggccgagatccgcactgcggtaaaaaacctgattgttgatgccaatgaccttctcggttcgcagggcgttatctccgcactaacccggaaactgcgcacagcgatcgcc |
| | | gatttcaatgatgcacaggttagcttctgcaatctgataaaaccatctgaggataaaccatcgctcccggcactgcgtgactgcgcactcaatatcctgcaacatcagtccgct |
| | | cttaaagcctggagtgactggagccgtgtgcgtgaggaagcgatttcacatggcctgcaaccagtgatcaacgcgctggtccatcttgactcaggagacatcagcgcggca |
| | | gagatttttgaaactgcctattgccgctggtttgcatcgtggatgatcgattcagagccgctgctgcacaattttgtgccggctgagcacatgagtgatattgaggcttaccgtac |
| | | gcaaaccgatcgtctgtccaaactggcagtacgctacatccgtgcccgtttatgtggcgtcattcctgcaaaaaatgaggtcagcaagcagggtggttttgctctgcttaaaca |
| | | tgaactacagaaatcccgtcgtcataaaccggtacgtcagatggcagcagaaatgggagatgccatggccaaacttgccccctgcatgcttatgagtccgctttcagtcgcc |
| | | cagttcctgccctcggaccaggacttgtttgaccttgtgattttcgatgaagcatcgcagattgccccgtgggatgctatcggcaccatggcgcgtggcaaacaggtggtaat |
| | | cgctggcgatccccgccaaatgccgcctaccagcttttttaatcgtgcagccaatgacactgacgatgatactgaagaagatatggaaagcattctggatgagtgtcttgctgc |
| | | cggcctgtataaccacagcctgagctggcattaccggagccgtcatgaaagcctgattaccttctccaaccatcgctactatgacagtagcctgattacgttccccgcttcgga |
| | | aacaaagcaaagtgctgtccagtggtgcaaggttgcaggcgtctactctaaagggaaaggacgtcataatcaggccgaggcagaagcgatcgtcgctgaaacggtgaag |
| | | cgactgactgataaagagttcgttgcatcaggcagatcgataggcattatcacgctgaataccgaacagcaaaagctagtcagcgatctgctggaccgtgccagacagcaa |
| | | caccctgaaattgaacccttcttccagtctgaactggaagaacctgttgtggttaaaaacctcgaaacggttcagggggatgaacgcgatttgatcatactctgcatcgggtac |
| | | ggcccgactgaaccgggcgcaaatacaatgtcgatgaattttggaccgcttaatcgcgagggaggctggcgccgactgaatgttgccgtcacacgtgcgcggcaggaaat |
| | | gatggtcttcagctcgttcgatccttcctttatcgaccttaatcggaccaacgcccgcgcggttgctgacctcaaacactttattgagtttgcccagcgcggccctgtagctcttg |
| | | cccaggcagtacgtgggtctgtaggcggttatgactcaccgtttgaagaggcagtggcaaatggcctgagaagaaaaggctggcatgttgtcccgcaaattggcgtatccc |
| | | gtttccgtattgatttggggatcgttcatccggataagcctggcgactatcttgtcggtgttgaatgtgacggcgccacttaccatagcgcagcaacagcacgcgatcgcgata |
| | | aagtccggagctccatcctgcagggcctgggctggaaattactgcgcctctggtcaacagaatggtggattgataaagaaggcgcactcgacaggctggatgcagcaata |
| | | agtcgcctgctggaggactccagagcagcggaagccgcactgattgctgaagcagaaaaacaaaagcagattacgccagtcatcgctcccgtaaccaatgatgtcagtga |
| | | tgacatactggtttctgaaactacacctgtcgctaatgatgcggaaatatccgcgtcagtaacccctgtcatcccgcttactgccaaagtaagcgaagatgatggtaacactgg |
| | | gctgaggtatgcatctttagcttctcagaataacgacaagccagtgaatgtcggtaagtatgtcgttaacgatcttcaggaatggtgcgacaggacagatgcagaacaattcta |
| | | tatcgctgaatatgatgagacacttaaaaccctcattgaagcggtggtgacaagtgaatcaccggtcctggatacaacgcttgtgcaacgcatcgcacgtatacacggcttca |
| | | ctcgcgccggcagactgatacgtgaacgcgtaatggaaattgtggatcaacactatcaccttgcaaccgatcactcaggtgaagacttcgtctggctgtccgcagcgcaacg |
| | | tgctgactggaatgtgtttcgtttgccagccacggataacgacattcgtcaggttgacgcgatccccagtgaggaattacgcgcactggcgctgagtattgaaggtgacaata |
| | | agatacaggaaatgacccgctcgcttggcattaaacgcctgactagtcaggcaaaaaaaaggattgaatcagtacttgatgttgtttgaaggtcaaccgtgtggaaaacctctt |
| | | ttagagactaacagtctgaaatatagagtcttattcgatcatcttgagaccgaatgtattagagtcgatttctgacacctcttatcgtggttttctgcatcaccaacatcgaccagtt |
| | | gggcgtaatcaaggaggacgtctggaaaacgaatctatggtcactcccgtttttgcaacaccgattttgacaataagttggtttgcttgaatctattcggcatcagaatggaatttt |
| | | ttttccacgcctcgatgagttccgcgcctgatgaa (SEQ ID NO: 381) |
| 28 | ATPase + | ttaatgcaaacgcatcaggaagggcagacctagtcacatgtagaatacgatagcaataaaaaagtctaattagaatgcaaattgatgcaactctatgccctccaagaactcca |
| | protease | aacctgaaagatttatgtaaaacatagtgttcgtttcaccaaaatacatataaactacattaaaatagaaatttgtctcacctataagccatttagacaacagattaatgaggtttgta |
| | (ietAS) | tcacaaatgaccacaaacgagatactttcgcagcttatcagtcttggactcaaaggggataaagttgcttttgttcggcaggcttcgaaactcgcgcgttcctatgattctatggg |
| | | gctgcctgagcttgcttcagccattagaggtagtattcaagataaaaacacgtttaacttgcagaaagtatcacgcagtacatcacctatttttgaacgtcttgatacattacctgt |
| | | agataaagaaactaaatttgatttagcagacgtaactcaaccgtcttctgaaattcaactcccattgttgaaagatagcactctgaaaaaaattaaagaatttttgactttcactgaa |
| | | cgagctaaagaattaaaggatgccggtcttggcgtgacatcctctatgattttatatgggccaccaggttgtggtaaaaccttgacatcaaaatatattgcatcctgtctaaattta |
| | | ccgcttcttactgcaagatgtgactccttagtctcatcatatctggggtctacttctaaaaatatcaggcagctatttgagtatgcaagtaaagcaccatgtgttttatttctagatga |
| | | actagattctctagcaaaggctagagatgatcagcatgagttaggtgaactgaagagggtggtggtttctttattgcaaaatattgacaatctacctgaagaaacaatattgattg |
| | | ctgcaagtaatcatgaaaatcttctagatagcgcagtttggaggcgctttgagtatagaatatctattggattgcctgattttgaagtcagaaaacaactatttgaacaatattcaaa |
| | | cataaaagctacatatgacgattttgttgatgaccttgcggaaatatcatcagggctaaactgctcatttatagaacaatgctgcttaagatctgagcgacatgctctggtttacaa |
| | | taataaacaaatcgatacccgatttttagtcgaggctatcttagaagcgaagggagttacatttgatgaagaagataatttacttataaagattgtgaccactctcagagaataca |
| | | atcccaaaagatttacaatacgaaagatagcaaaaatactagggctttcaaatgctaaagtgtcaaggctaactaagaactatagagagatattatgagtaacaaagaaagac |
| | | caataaaaataattgaggcgacacctcaagattttactgaaaaaacatataatttcggaaagaaacaacctatccgaacagtaacaactagtctaaaaaatagactcaaacaa |
| | | gaagtcgatgacgttaaaaattttttccagagctcatttaaaaaatggcccaatataccggcggtggctagagttactcttcatgaaaaagctcttgctaagtcacatcgcccatc |
| | | aagcctattaggtgataatacatgtcccgtaataggcagtgataattttggagaattacttataagtgttactgaaaaagggttagcacaacttcgcaaaaaaattgaaaatagca |
| | | ctaattctcataatgggacagtacatattgctgtaattgaaaagatcgaaccttttagtcttaaccatgatgttatagataaaaataaatcagatagttttcttctgaaactctttgacc |
| | | ataaagatagaacaactaaccgcagtatcgacaaagaattaatggaatttgcagatgaactaggaatacaaaaacccaaaaagtatgatatcagttcagatttgagtatatatg |
| | | aagtaaaagggaatgataacatcgcccaactggcaagttttattggcatacgaaaattagaacctatgccaacatttggtcttactcatacagtatcgcaatatattcctgctgaa |
| | | actctagacctagatgattttcccttacctcaagaggataaacattatccactactcggaattatagatagcggagtcgatcccaataacaacatacttaggccatggatttggga |
| | | tagtttagatttagtaaaaggagaacacgactattctcatgggaacatggttgcaagtttagcaattaatggaagatggttgaataactatgctggttttcctcaatgccaagctga |
| | | aattgttgatgttgcagcctttcccaaagatggtacgctcaaattgccacaattaatgaaagctatccgagaggctgtgaccacctatccagaagtacgtgtatggaatctgtca |
| | | ttaggttgtcaatccccatgttctgaagacagcttctctgaattggggcattttttaaatgcacttcatgatgagcatgattgtcttttcgtcgtagcatccggcaactacatttatgat |
| | | cctcaacgaacctggcctcctcaagaattaggtgggcatgacagaatatcagcccccgcagattctgttcgttcattaactgttggctcagttgcccatttagaatcgtctgactc |
| | | tgtggtcaaaagatttgaaccttcatctttttctagaagaggtcccggcccagcctttatacccaaaccagagataaatcactttggaggtaattgtgacagtaaattaaactgtg |
| | | aacataccggaatcatagctattggcgaggacaatgctctttgcgaaagtattggcacaagtttatcagcaccgttaatctcaagtttagcggcatcactgtggcatgaactaga |
| | | tgttaatggttctatttcaccatcgcctgaacgtatcaaggcactattaattcattctgcgttaaaaaactcaccagccaaaacggagcattatgcgtttaattatcaaggatttgga |
| | | cgcccaagcgatcatataaatgatattattggttgcaataaaaatgagattacatttctatttgaaatagatacccgagaaggtattgaattcagtagaacgccatttgtaatacca |
| | | cagtcattacgtactgaggatggaaaattcacaggtgaaattattatgacactcgtttattctccaccgcttgattatgactacccatctgaatattgccgttctaatgtggatgtgtc |
| | | attcgggacttacacttatgatccagttaacgctaaatggatacatagcggaaaaattccacaaataaaagaaaagagtgaattatttgaaaaggtactgatagaaaatggcttc |
| | | aaatggtctccagtcaaagtttatagaaaacaatttccgcaaggtataaatggggagcaatggagacttaaacttgatgttcagagacgagcagagcaagagcctctatcttc |
| | | acctcaacgtgctgtattggctattacgttaagatctcttgccaattctactacagtctacaacgaagccgaggttgaaataaataatcttggttggaaagaaactgatattgttgtt |
| | | cgtgaacaaccaaaaatcaggattcgtcaaaaataagcattatggtcaccttttataggtgaccattta (SEQ ID NO: 382) |
| 28 | ATPase + | gggacactcaggttacataacaatgagtgatacagttcacgtagtgaaggtactatgcctaggtgtttgattacactttgatcattgatgatacgctcatgaaggtattactttcct |
| | protease | gtaatgagcaggtaggtaacgatgtcgaactaaatgaatttatagtaaactttgcaacaagagaacaagggagtatgaggggttatggctactgcagagcagatcaaagcttt |
| | (ietAS) | attgaaaagccacgttgatcgtgatgatcagcgtttcttttctattgctttgcaggtggcagctaaggaagcaaggcaaggtcatcataagcttgctaatgatataaaaaacttag |
| | | ttgataaaaatcagaaaacaacgagttctgtaggtttagttgaaaaacgacttacaccatttgttaagcagcctgatggtgatcttaaggggttacttgagcaaacgaacaagcc |
| | | agtacatcttcaagatctggtgatttctggaagcgttagggaaagattgaatcaggttctgcttgaacaaaaacagaaagataaactttctgagtttgggcttattccaagaagaa |
| | | aaattcttttcactggtcctcccggtactggtaagacaatgtccgcatcagtcattgctacagagttaaagctaccactttatacagtcgtcttagataatctaatcactcgctatat |
| | | gggtgaaactgcagctaagctgcgtttaatttttgaccacatacggcaaacaagagctgtatatttttttgacgagttcgatgctataggaactcagcgtggcgctcagaatgac |
| | | gttggagaaattcgtagggtcttaaattcttttttaatgtttgtagagcaggatgattctgagagcatagttttagctgcaaccaatcatccagagcttttagatcgcgccttatatag |
| | | acgatttgacgatattataccgttcacaaggcctgaggataatctaatcaggaatcttattgaacagagactcgctgtctttgacctcggtaatttattttggagtgagatcattgat |
| | | agtgcttcaggtctaagtgcagcggagatcacgcgagcaagtgaagatgctgccaaagaatcagtgctttataatgcaaacaatattacaaccgatttgttagtaaaggctata |
| | | aagcgtaggcaagaaagtagacaataagggatgaaatgactaccaacaagaggcatattttattaaacggctatgtttcccccgaaaactatcgctctaggagcaatggtcgt |
| | | agtccccaagtcccagctcgtgatcgagcggtacatggtatatcattactaaatcagtatagccgtatattgaatcattatgatgaaagaccgaggcttccccctgttactgatga |
| | | aaaagggatttatgttaggctaatcagttttgaacaatgcgatcttcctatagataaaatcgataatacttatttcaagctttgttctttagttaaatcaaataatcgtgaaactgcgatt |
| | | atatacattaatgaaaatgacagaactaaattcactaaaaaaataaatgactatttgaatccatcgaaggatggtatcgagttccctagaaatcatttgttaattgatagcatacaa |
| | | aatatcgagttagcagatataacttctttctggacagataaaaaagatcttattccggatgatcacggtgttgaaaagtggtttgagctttggcttaagggtaataaggaggatgt |
| | | gctaaatattgctcggcgtttatgcgaaagaattaatggaaggctcgggaatacttctattaattttttcgatactactgttgttcttatccgtacgagtctatcgagattaaaagtttg |
| | | tcctgaattaatatctaatttaaaagagataagatcagcgagggatgatatatcagttatagttaattccttacctacagaacagcatcagtgggcagaaaatgttgctgcaagaa |
| | | ttacgcgtaacaatgaagctgatgtttctgtttgtatattagatacaggtgttaactacaataatccactattatctagatttactaactcatcactggcagctgcttgggacatatctt |
| | | ggccacttttcgatgattataatcaaaggccttataatgaccacggttccagacaagcaggactatgtgtttatggagatttcctgtctgttttattgaacgatcaggacatttcgat |
| | | tccgtacaatatcgaatcaggaaggatactacctccaagagctactaatgatcctaatctttatggagctattactacaggaacgtcaagtcgtctggagctggaaaacccgaa |
| | | ctggcgcagagtttattcgcttgctgtgacagcagagcctaatactcttggaggccaaccgtcctcatggtctgcagagattgacaagtttagttttggtttagaggatgatatcc |
| | | gcagattatttataatttctgcgggtaactctcaacctacaaatttagaattagattattgggattcagtgactcttgctgaaattgaagatcctgctcaatcttggaatgcattaactg |
| | | taggggcgtatactgataaaacaacccatacagaccgcgaatatgatggttggtctcctttcgctatgtcagaagatattgcaccgtcatctcggtcatcggtatcctggggatg |
| | | gaaaaagcatgccccatataagccagatttagtagaggaaggcggaaacaaacttatatcacctagccgtgatgaaatcacaaatacaattgaattatctttgctcacaacctc |
| | | tggcagggcaacaaatcaattgtttgaagttaattcagatactagcgcagcctgtgctctagtatcaaaacatgctgctatgctaatggctcagtacccagaatattggcctgaa |
| | | actattaggggattacttgttcatacagcaagatggactagtcgtatgcacgaacgatatagaacagaacgtgcacaggggacaccaaaatcggctaaagaaagcttattaa |
| | | ggatggttggttatggagtacctaatttaaatcgagcaatgcatagtgcggaaaatgcacttacattaatatctcagtcggaaatcaccccatttaaaagagatggttctactgat |
| | | cctacattgaatgaaatgcatctgttttcactcccttggcccgtagaagctcttcgcttactaccaccagaaacaaatgttattttaagaatcacattgtcgtattttattgaacctaat |
| | | ccaagtcaaaaaggattcagacgacaatattcgtatcaatctcatggattgagatttgcagttattagacctaatcagacccttgaaaatttccgtgcttcgataaaccgtaatgc |
| | | gaataatgaagaatacaatggacctgaaggagatgcgtcaggatggtttctggggcctcaactcagagttagaggttcattacactcagatgcttggaaaggcagtgctgca |
| | | gatttaacagagatgaatactatcgctgtctatcctgttggtggatggtggaaatatcgtactgcgcaggatcgctatattaacaatgttaaatatagtttattggttagcatagatg |
| | | taccagatgagaacattgatatttacagtgagattcaaaacattattcaaattgataatcaaatagatattgaacattaaggttttatgcctaaggtttaatgagtttgaaatgaaaaa |
| | | tcctttactaattggctgggtcgatgataaagacctggccatctttttatacggaaatgatttatgttttattttactaaatttatattagaaccatcgtgcagattgtgataattccttcat |
| | | actgattttttacctattatagttgatttttgttgcttgatatctctctttaatacaacggcgtagtac (SEQ ID NO: 383) |
| 30 | Retron- | tctatctaaaagtatacatatagtatttcaatgaaggttatattatattttgtggctgttttctaattttatcaataagattattgcaaaaggctgataaatataatagctttattatatcgga |
| | protease | ggagttgatttaactttcctatactatctgtataggctaataccaatggcaattttgccctcaaattggtctccttaatgtttatcaacgtgttatacggtagtgataaaacctcctccg |
| | | atatttttctcatgaattgggatattttaaatatgttttgctcagtaaccaagttgcatgaatgtaaaaatgttgaacaattatactattttttaggatgtgaagaggctgaaattagtag |
| | | gtttttatatagtggagtaattaaataccgctctttttccatacttaaaaaaaatggtaattttagaaatataagagcacctgtaaagtatttaaaagaaattcagtataagataaagg |
| | | atgagctcgaaaaatattataccccgaaatcatgtactcatggttttatagctggaaggaatataatcacaaatgcgaaacctcatataagaaaagaatttattttaaatatagattt |
| | | aaaggatttttttgattcaattaattttggacgagttagtcgtttatttcaaagccaacctctaaacttgccagagaatgttgcccatgttttggcacatatttgttgctataatagagcc |
| | | ttacctcaaggtgctcccacatccccaattatatctaatatgatatcttatcgtttagacagacaattgaaggagttggcaagaaataatgcgtgtacttataccagatatgcagat |
| | | gatataactttttcttttactaaaactaaaaagtatcttccaaaatcaattgtttctttaagtaaagataataacattatactaggccatgaattaaaaaaggtaattgaagataattggt |
| | | ttgaaataaatgaaggaaaagtaaggttacaacataaaacacaaagacaatcagtaacaaatattacggttaacactaaaattaatataagtagaaaatttaaaaaacaaacttc |
| | | agctatggttaatgcattatttaaatatggagcatctaaagctgaaagagaatattttagtaagtatcacaagggttatatagcagaaaggcaatataataagattaaagaaaaac |
| | | caggtttattatttacacaaaaagtaagaggaaggttgaattatatccgattagtttgtggtaagaataatgaaagctggagaaagctcatgtataaatatactgtggcaatagga |
| | | caacctaatgaggagtacaatagaacattgtgggatattgctggtgattcaacgttcattctttggtcgaattcctcacaaggaagtggtttttttcttgaaaatattggtttagttac |
| | | aaatgagcatgtaatcgaaggaatagaaaacagcaatattaataatgatctaataatactttggttaccaaatgaaagaaaagaatatattgagttacacttagcttggaaagatg |
| | | ataatactgatttagctgtaattacttctaatatatcttttcttgacataaagcctttacaagtagagccagttcctatttatgatataggaacagaagtatatgcagttgggtatcctaa |
| | | ttatgacgccagaggctcaattggaaaacctactattattacagcaaaaataacgagtataattactcgagaaaggcaagaaagaatcgttatagaccaaccaatagtacatg |
| | | ggcatagtggtggggtcgttttaaatgctgatggacgtgtaataggcattgttgcaaatggaaatgccgagggggaattaagagtagttcctaatgcttttattcctattgaaatat |
| | | tattaaatgagcacaagttacgaactaaatcataaaattattattcttaaaataattaaatattttttaaaaccactagtttgataactagcggttttttatttttggagtacat (SEQ |
| | | ID NO: 384) |
| 30 | Retron- | ctttaaaatgtttcatacagcatacttgtataaaaaaaactttatgctataaagacataagtggcggcctttgagtttaactttcctacgactatctgcgtaggtcatttttcaacggca |
| | protease | gttttgcactctaagtttgccgataagtttgtcgcgcagctggcaatagagaaaacatggccgccactcttccatataaggatttttatgccctcattttcattaaaagaatgtaatg |
| | | acgtttggaaattatgtgatttactgggagttaacttcgaaaatctatctaaaaaagtatatccaagtaataataggttatatagatgtttctttattccaaagaaatctggtggactaa |
| | | gagaaatatactgccctattaaatcacttaagaacttacaaaagaaaataaaaatagagctagaaaaagaaataaaatacagatcgcctgcacatggatttattaaagggaaa |
| | | agtataataacaaatgctgaacaacatataggaaaaactatagtacttaacttagacctcgaagattttttcaaaaatatacattttggcagaataaaaaaattatttgaatcaagcc |
| | | cattaaatttaaaacactctgtatcaactttccttgctcatatctgttgtagaggtggtgtattaatagctggttcgccaacatctccgattatatcaaatatgatttgttataaattagat |
| | | ggtcaacttcaacgtttagctaaaaaaaaccactgtacatacaccagatatgcagatgatataacattctcttttacttgctcagaaagaaagttgccgagagggatcgtacatat |
| | | agatgaaagttcattattaggttttaaattaggcgatgagttatctgaaattatttcaagtaacaacttcactctaaatgaatctaaaataagattaagtcgaaaatcacaacgtcaa |
| | | gaagtaacgggtttaatagtaaattcaaaagtaaacgtaaaaagagacttcattcgcagaacatcatctatgattcatgctctaaaaattcatggtgctgaagacgcagaaaaa |
| | | gaacattatttaaaatataaaaaaacttatataccagaaagacaaaataaaagacaaaaggataaacctggagatctatacacaaaagtaatcaaagggagactaaactatctt |
| | | agaatggttagaggtgaggattgtaacttgtggcgtaaacttatgtatgattttactgttgcaatgaagaatccagatgagtcttataaacgaacatggttagacgatgcggcag |
| | | agtctactgtgatatttaacacttacgatgggtgcggcagtggttttttaataaatcatgatatcaaaaaatatcccaatggactcattattactaattatcacgtgattcctgagata |
| | | aatagtgataatatttcaaacattgaagttcatacatggatgaatccttctaaaggatttttattacttaaatttgtagcttcaagtaaagacttagatattgctatattaactgcggaca |
| | | taccatttccagttagtaagtttttggttgtaaattcatgtcctaactatagacctggaattaaaattcataccataggatatccagattattcatctggagaggatccaacttttatatc |
| | | tacaaaaattaaaggtaaaactacatatcatggtcaattgagatatcagatcatagatgaaataaaacatgggaatagcggaggccctgtctttgattcagatagaaaagtcata |
| | | ggcattgtgtctaatggaaacgaaaaaggtgcaccaaaaaacaataagagtagcttcataccaatcgagaccttgcttgattttataaattgtcaaaagtaaatgttttaaaaaaa |
| | | ccatacattgataactatatttttacacagtaaaaaacaccataatcttatatggatatcagatta (SEQ ID NO: 385) |
| 30 | Retron- | aagaaaaaggaatcttctaaattaatgaaactataattatacgaatcagtaataccacagttattgacatattttgtaataagctttatttttactaaagcacagtacatcatacaaatt |
| | protease | taattttctactgacttatcagcggtagccataaacgtgtatcttctgcctcagctatcctacagtttcttgtggattgtcgtcattgcaaaagagaaaactagatgatgtattgtgct |
| | | cccctttttaaaggactcgcatacaatgtttgacccattcaaagtagcgccgccaaaattgaaactacatcaatgtgtagacgttcatgagctttctgcaatattaggaacgaact |
| | | acaatcagttatcaaaattaatatatcctaccactcaaaattcttattattgtttcagtattgataaaatgaacgggaacaagcgagttataaatgcacccaaaaataaattaaagtc |
| | | gatacaaagacgattagcatatttacttaatgagtattatcctgtcagggatgttgctcatggttttattaaaaataaaagtattgtgtcaaatgcagaacagcatgttcttaaaaact |
| | | gcgtattcaatatagatttagaaaacttctttggtcagatccatttcgggcgtatacgtaatttattattttcaccgccatttaacttttcaacttcggtatcaacagtaatttcacatattt |
| | | gctgtagtgatggttttcttcctcaaggtgcaccaacatctcctataatatctaatttaatatgttataaattagataatgaacttaggcgattggccgtttatcataaatgtacttatac |
| | | aagatatgtagatgatataacattctcttttacatgcaaagcaaatagaataccatcacaaatagttgtatcttcaggaaatacggtaacgccaggtaatgagataaatgcaataa |
| | | taacaaggaatggtttctctataaacgacaaaaaaaccagactgcaacaaaagaatgaaaggcaaatagttactgggatagtggtaaataaacggacaaatgttcaacgga |
| | | gttttgtccgaaaaacaaactcaatgctgtatgcatgggaaaaatttggagctatcttagctgaaaaggattactttgataaatacaatagcaagattaaaactataaaactaaaa |
| | | gatttcattgataatccgggagagttatttaagagtatcgtaaaaggaaggataaactatataaaaatggttagagggaaagatgatgtaatatatagaaaattcgcccatagga |
| | | tatcttgtttattcggcaagtttgataataggtatcttaaaacaccgtatgattttgctattgaatctacatttgtactcgaaaatagatgtgatgactcacaaggtactgcatttttacta |
| | | gagagaatagggttggttacaaaccatcatgtcgtagaagatatctgtgatatcacagatgagtttattgacttattcttatggaatgaaataggcaatattcgaaagacaaaattc |
| | | ataatgtcaaacaaactgtttgatattgccgttttcgaaagaacatccgacttcgacaatataacaccattaaaaattggtgatgatagtggaataaaaaatggtactgttattaca |
| | | gtaattggtttcccacaatattctcctggtgaaagcgcttatgtgaatacaggaaaggtaattcaatcgaaaactatgtatggtaataaattttggcttattgatatacctgttattcat |
| | | ggaaatagtggtgggccagtattaaatgacaaatttgaagttataggtattgctagcatcggtacagcgaagaacgatagttcatctaaacttcatgggttcattcccatatcgac |
| | | tttattaagatatacgggtgaagataagccttaatctctctttctctaagtgatttttaaagcgcctacagtccatactgtctggcgtttttttttgttaccggtcatacgtgccattctga |
| | | tgctgagaatatgacattgggcat (SEQ ID NO: 386) |
| 30 | Retron- | ttacattactatataatatgcaattaaaatgaataatttatactattgacatattttgtaatacgctatattttttaacggcacagcgcattttatcacaatttaactttctactgactatctg |
| | protease | cggtagccataaacatgtaacttctgcatcggccgactttccgtatctcgcatgtttgccgaatttgcaaaagagaaaatagataaagtgcactgtgccctatttaaaggaatgat |
| | | aataaaatgtttaatccaaccaatatattaccaccaaaaataaaattaaataaatgtggtgatgtacatatattagctgcgttatttaatttaacttatgaagatctatctaaattaattta |
| | | tccaactccaaatagatcctattatcaatttgctatcgataaaaaaaatggtagtaaacgggtgattagcgctcccaaaaagaaattaaaaatcgttcaaaaaaagatagcagat |
| | | gaattacttacactttatcctattcgtgatgtttctcatggttttattaaaggaaaaagtattgtttctaatgcggaaaaacatgttcttaaaagttgcgtacttaatatagatctcgaag |
| | | atttctttggaagtatacatttcggaagagtaagaaatttgttaacttcaccttcatttaatatacccttacctgtagcaacagtgatttccaatatatgttgttataacggatccattcc |
| | | acaaggagcacctacatctcctattatttccaatttaatatgttataagttagataatgaattacgacaactcgctggtaaatataattgcacctatacgagatatgtcgatgatataa |
| | | cattctcattcacatataaagccaaaagaataccatatcaactagttacctctgatgccaacataataaatataggagttgaattagaggaaataataactagaaatggtttttcaa |
| | | ttaacaaaaacaaaactagattacagagtaaaaatgaaagacaaactgtcacaggaatagttgtaaataagaaaactaatttacagcgaaaattcatacggcaaacctcatcc |
| | | atgttgtatgcatgggaaaaacatggcgtagtagctgctgaaaatgaacactttgttaaatataacaaaaaaaataagctaataaaattaagggatttcgtagataaaccagga |
| | | gagttgttcaaaagaatagtaaaaggtcgaataaattatataaaaatggttagaggtgaagacgatataatatatcgtaaatttgctcacagaatatcttgtttatttggcaatgtaa |
| | | ataatagatatttgaaaactccatctgattttgctattgattcgatttttatcttagaaaatgaggtggatatatcacaaggtacagctttcctcttagaggatgttggtattgtaactaa |
| | | ttatcatgttgttccaagtatagatgaatataatgatattgacttatctctttttcgatataatgaattggataataaaagaaaagtaaagttcataatgtcaaataagttatacgacttg |
| | | gcgatattcgatactaatggcaattttgatgatataaagaaattttccataggggatgattctaatttaaaggtaggttcagaaatatctgttattggcttcccacaatataccacgg |
| | | gagagtacccttatataaataccggtaaaatagtccaatctaaagctcttttcaataataaaatctggcttgttgatatacctattattcatggaaatagtggtggtccagtttttaatg |
| | | agaaatttgaaattattggcgttgcctcaaatgggacggagagaaatgatcagtcatcaaagttacatggcttcataccaatatcaacactaataaaatttattagcagtaaatga |
| | | ttttaatattaaagtgataagcgcccctgttacgcacacagagaggcgcttttttatttcacctctcatgatgaatcgtttcgagccaaaaaggcagagt (SEQ ID NO: |
| | | 387) |
| 31 | RT- | agggatacgccacagcaagaaatagtttacttattcctcattttgtcgactaaaaatcgacattaaacaaaaaattcaaacttaatcactttcgggaaaaatgtgacaaatatatgc |
| | nitrilase | tcggactggttgcggggagcgtgtaacatggatacaaatcaaaattattgccagcctcactgatggattactggtgtcaagagccccccttcgggcatgaaacggctggcta |
| | (UG5) | attctgtacagactgtaatctaaggacgataacgcatgacatatcaggcaattttcactggctgggatgatctgacgattgaagaccttctggtcgcttaccggaaagcaaaag |
| | | ccgatagcttctttgagaatacatttcctgttgctatcaaatttgccgagtatgagcaggaattacttgaaaacctgcaaaaactcttagatcttttgcagagcgaagatggattca |
| | | gtagcaataagaagttgattggcaaatttcgtttgttaccgaaaaaattaaccacaaagaaaaaacatgaatcccaaaatggacacgtccacttttctaatcctaaacgagcag |
| | | ccgaccatttatttaataattttgatctgataccagagtttcgtattattggtgacttcccggttgatagtcacattatctctgcactatggattaacatggtcgggcataaatttgatgc |
| | | cagcttagataactgttgctatggcgcgcggctaaagcgtattcgtaatgatgaattatttagcaatgagcaggataatccattccatatcagtgccgtgggttcttttagccccta |
| | | cttccagccctaccaaaaatggcgtggtgatggcttaaaagctatacgtgacgagttggaaaaagatcgtgacattatcgccgcctcactggatttaaaaagttactatcatttta |
| | | ttgatccactggctataacctctgatgatctctataacacactaaacataaaactgactgaggatgaaaaagcgtttactgcacagttagcagtattcttaaagcactggtctgac |
| | | ggcgcagcggcatttggaaagaaaatagcgtacaaaacacctgttattaatggtggtctggtcattggattaacagccagtcggatcatttcaaatatattgctacaccattggg |
| | | ataaattagtcattgaaaaactatcaccaattcactacggtcgttatgtcgatgatatgttccttgtaatacgcgatacagggacaattactaataatcacgaatttatgttattgctg |
| | | caagataggcttggcaatgattgcgtttatttgaaaaacgagcaaaaacaaatatggcaaatacagcagggcgagcatttccagggtaagaccaccatccagttacaatccg |
| | | ataagcaaaaacttttcgtgcttcaagggagggctggaatagacctgctcgacagtatcgaaaaggagatctacgagctttctagtgaacaccgcttgatgccttcaccggat |
| | | caactggaacactccaccgcagctaaagtcctttccgctgccggtagtgtaggtgaaaatgccgatactctgcgccgtgcggatggattaaccattcgtcgtttgggctggtc |
| | | actgcaattacgctacgttgaaacactggcacgagatctgcctccaagtgaatggaaagaacagcgggaagagttttatcagtttgcctacaaccatattcttagggctgataa |
| | | tctatttgcacattttagttatctgccaaggctgcttggctttgctatcagtatgaatgaatggcagcacgcggaaaaaattgtacttaaagcttacgaatccatcaacctgttggc |
| | | atcggtgattacttcaggtaaggaagtgaatataaatggttgcaaaactcgagcagtaaatgatctttggcgctgtataaaaggcacattaagctggctatttgttgatgcagcg |
| | | acacgatattacagtcctgacagattatttcttgataaacgttcaaagaaagaagagtgccttgcggatacattttttaatcatatttcacaaagtctgacgaatctaaaggatttac |
| | | tggatcttcgctttgattcagcagatttttatttaaaagcgccattggtagctcgagctgatttagcaaaggaaccttataaacagatcgtaaagagtcagtcggcagaaaaactt |
| | | gttaatcagcgtgatagtaaaaaagaagttaaaatactgaaattaatgagcgactcatcgcttattgatattgacgttattaagctatttttgaaatcaaccaagaatacccgactg |
| | | gaaaaagtggctaaaggaaatcgtaagaacgaaagttacctaccttacattttccctacacgtcctttaacacccgctgaaatatcagaactggcccccgaatgtgttggatta |
| | | ccctccacatccgacaaaaaaccagatgagagaccgtccaccatttgggcaaaatatactcaagcattacgcggagtatggatcaaaccgacgttgctagcatcggagcag |
| | | gactcagatgaagcgacaaaaaaagctcggcctaagaaattcattcatattggcacagacaggaaacataaagttgtcgttgcgctaaccagcattaaaacagaggaggac |
| | | gactgggctaaaatggcctgcaataaatctaacttgtcccgttcaaggtaccagcggatttctgaactggttaatgcaacattgaaactatctcctaaacctgattatgttttattcc |
| | | ctgagctttcaatcccgttacgctgggttaacagtattgctgatcgtttgagttcggcgggtatcagtctaattgcgggaacagaataccgccacttagacgataatcaactgaa |
| | | gagtgaggccgtacttgtcctttcagataacagactcggctatccagcgagtgtcaaaatatggcaacccaagctggaacccgccgtaggtgaagatgaggcattattttcaa |
| | | tttatggtaagtcttgggattcgacacttaatgttaaacaacgtaagccggtatatattcatcacggcgtcaattttggcgttatgatttgctctgaactccagaatagtaaagcgag |
| | | gatccgttttcagggcgcactcgatgcattaatggtattgagctggaataaagatctagatacgtttgcatcgttgattgaatcagcagcgctggatattcatgcctatactatttta |
| | | gtgaataaccgaaaatacggcgatagtcgcgtacgttccccggcaaaagaaccctttatgcgtgatattgctcgtgtgaagggcggtgataatgactttgtggtcgctgcaac |
| | | gctggatatcgactcgttaagggcatttcagagcagggcaaaacgctggcctaaaggcggcgataaattcaaaccgttacctgaaggattccagttggcaaagaaccgcaa |
| | | aaagctaccgccaaaataagaaactgattttcgctattaataatcagggtatttttgcgtgagatgttggtaaacatgatgtagcccttgccactcatgaccaatcgcagtatcttt |
| | | ctcccgcgcctgcaaaatcaggcgtcgggattagcctcctgaagaaatcttatcggcgacacatgacgcgccagcgtctttttttgtgttgttcgcacggttacatc (SEQ |
| | | ID NO: 388) |
| 31 | RT- | ttttcaaaggagtttcgctttccaaatatacaagaaatcattatttctaaaggtatctataagtggatgattcgttttattggaacagttgcattctcgttaattaaagcggctgcttccg |
| | nitrilase | accggcgaatggtcattcagaagctgagaatgtggttattttttaaagaggaattggcatgattattagccttgaagagcttggccttgcctaccgaaaagcaaaagtcgatctg |
| | (UG5) | tactattcatcccatgtttcgctggaagcaattgcgtcttacgaagagtccctacatacgaatctgacggttctgcaggaaaaaatacaaggtgacgacgaatcatgggtggaa |
| | | gagaatgagttcactggcaactggtttctggccacaaaatctgtagacatgtcttgctgggaacagcagcgagaaccgcaagctaacggtctcatattttcctcacctgctgaa |
| | | aagtgggcatatgcttgcaacccaatggctgataaaaacgaacaaaaaaaaatcaaagccgagtttcgagtaatggctcaatgcagtctggattttcatgttctctcgactcttt |
| | | ggatgttaaaagtcgggcatctttttgatgccaaattatctacctgtgcttacggtaaccgcctgcgccgtactctagatggaaaagacatcaatgcactttcaattggttcttttca |
| | | accttacctcagaccttttcgtgattggcgtgacaatggcattaacgccatgcggagcgcgctaagtgaaagcaaaaaaatcgtggcactcactgctgatgttagttctttctat |
| | | cacgaactgaatcccgggtttatgcttgatccaaccttcgtcaaagatattttggagttggaactcactgctgaacaaagcaagcttaatcgattattcattaatgcgttaaaagca |
| | | tgggcaattgagactccgttgaagaaagggttaccagtaggtctccctgcttcagctgttgttgccaacgtagccctgatcgagctggatcgcgttattgagcagcaagtcgc |
| | | acctatatattacggacggtatgtagatgacatcattctggtcatggaaaatggtgcgaatttccgttccatggcagagctatggcaatggttgttcgcccgttcttccggcaaac |
| | | tggactgggtaaagggcgaggaaaacaaacagatcagttttcaaccaaactacctgcatgacagccagattcgttttgcaaatgcgaagaataaagtgtttatccttgcgggt |
| | | gactccggaaaaaccttagtggaagctattgctcatcagatttatgaacgagccagcgagtggcgagccatgcctcggttaccgcattcctcgaacaatgttggaactgattt |
| | | gcttgctgcaactcaaagtaatggcgaagtcgctgacaatttgcgtaaagcagatgcactgactatgcgtagggctggttttgccatcaaactacgcgactttgaagcctatga |
| | | gcgtgacctgcaaccgggcacatggaaaggccatcgccaggcattttttcgggcatttattgatcatgttgtggtgctgccacaattctttgatttatcagtctacctaccccgag |
| | | tgatccgactggccacggcctgtgaggactttgtcgaactgcgcaaacttatcttagcgctcgagaatatttgcgatgaagttcgagaaaattgcctccttaccatcaaggcgt |
| | | gtcctgatgatcacctcccttttgaagcagagattattggcaaatggagggctcagctttttagcagtgtgcttgaagctatcgttgcggcatttcctccgcgtatttccaaggtgg |
| | | gtaagcaaacctggaatgaccatttaaaaaactggcacgcccggtgtgggctagacattcaatattcgggtcgtgatttttcattaaagggctaccaagaacagcaggcgag |
| | | attattctctttcgacttagcgcacatgccattccgctttattggtctaccaaaagagatgattgctcaacggggcatacccgctccgaaaacagtagcccactgtgcggaagc |
| | | agcagaattactgcctgatattgtcgttttgggtaatcaggttgtagcaaaatggtgcaaatttaaaatcattccacatggactgctatttgccacccggcctttcagcctgccgg |
| | | aactctttatcctaaacaatgaggcttatacagcttcagctcagcaagaaatgcgagctattattttcgctgttcgcggttttgtactcggtaataaaacaccttgtgtcgataaaca |
| | | aggcatattgcaaatccctgacggccaatctgctggaaaatatggggttgccatatctagctggaaaacgtccatgtcaagctggactgcggcggtcatgcgttcagccgat |
| | | ccggatgcaaaccgttacgctcgcttatgtcgcttgcttgatggtgtgatagcccaaccacataacagtcgttacttaattctgccggagctctcactccctgcgcactggtttatt |
| | | agaattgcccgtaagttacaaggtcgcgggatttcacttgtcaccggcattgaatatttacatgccagtaaagcaagagtacgcaatcaggtatgggcttccttgtctcatgatg |
| | | gattgggttttccttcactaatgatttaccgtcaggacaaacaacgcccagcactgcatgaagagcaggaattacaacgaatagcagggctagaaatgaaaccagaaaaga |
| | | aatggacaacgcctcccatcattcaacacggtgattttcgtttttccttgttgatttgtagtgagctgaccaatattagttatcgcgcagcgctgcgtggcaacgttgacgcgctgt |
| | | ttgtgccagaatggaatcaggatactgaaactttcaatgccttggtcgagtctgctgcgctagatatccatgcttacatcatccaatgcaatgaccgccagtatggcgatagcc |
| | | gcatccgaggccctttcaaagatagctggaagcgtgatgtattgcgagtcaaaggtggtattacagattattgtgtaataggcgaaattgacgtacattctttacgacaatttcaa |
| | | agtagctatcgttctcctggtaaaccctttaagccggttccggatggatttgagatagagcactctcgaaaaatgttgccagaagcataagtaaaattggaaaaaaatatcgatg |
| | | caggttattaaagatgaggcaacatgccatagtcaatcataacctgcagatgtaatttgaaactgcatgttgagaattacggatttatttgtgtattcaccctcgcataaaaatgaa |
| | | gtagctttcatattccacactactgataccccctgaaaatatataactaaaaaaaacaattttaaaacatgaggtaggaatagcaatctgactgtgatgtagttatttttttgatgaag |
| | | ataattaggtgctcgttgttc (SEQ ID NO: 389) |
| 32 | TOPRIM- | atgccccgtatcaacgttgagaaactgctgcttgagatcgaaatcgacaaggtggcagagcgattgggtatggcgcttaggagcgaatcagctacgcgcaagctcacgctg |
| | RT- | tgcccgttccatgacgataaaactccttcccttctaattgatacgagcagagataattctggacagcattaccactgctttgcctgcggtgaacatggagatgcaatcgatctgg |
| | nitrilase | tgaagggagttcttcatatcgatttcaaaggtgcattagagtggctgtcaccaaactctactaccacccctgtaaatagggcgagaaaacagaaggctatgcagcctgagca |
| | (UG10) | gccagaaggctcagggcttgcgcaagcttataagttatacctgttaagcaatgacaagcaacgactagctaactgggtgactgatcgcaagcttgatatttttttgatggaagat |
| | | gcaggattcatatacgcacacaaaaactcactatctaaacaggtttcctcaagaaaagattttggaacgaagcgtgaattagcagcaacattggaagaagcgaacctaatac |
| | | gcaaaatccttccaagctcggggttccaaaactactatttaaatctacagtcaatccacgacaacaactatatagactttttttcaggggatcgaatcgtattcccgataagagac |
| | | gatcagaaaaaactactaggccttgccgcccgggcggtagatgagcaaccagcaaaatacctattctcaaaaaactttccaaaatccaaagctatttttagaatagagcaagc |
| | | tacaaccactctacgagcattggctaagcgaggcgaaacagatctacgcttatatatctgcgaaggattttttgacgctctaagattggaaagcttgggatttcctgcagtagca |
| | | gtaatgggaacatcaattagcaaagaacaaattaagattatgaaagggcttagcgacacgctcccttcaaagctagcctctttgacaatctgtatttgttttgatcgcgatgaagc |
| | | gggattaagaggagcatccgaggctgtactaaaattcttaggcgctaatctcgacgtggtatttgtatggcctactactgctcagcttacaagcgcagaccattcaaacacaag |
| | | cataaaagatcctgacgaatatttgagaaatttgtccgcgccgcaggccaagtcacttatcgatgtttccacctatggacctgtagtagcagtactagcaaatcagtttggtgtg |
| | | catgccgacgaactgcttgaaaatctaaagtggaacagtgccagtcgctctcgaaaatacaggtcatttgagaaaactcgtgctgaactcaggaaagttgtagccaaccccc |
| | | atctccaatcaagcgacctttttttaaatggccgaacagatcttgactcggcggctcaaatagaatggattgattttttaagtgtcgacattgcgactgaagccgctccatcggaa |
| | | tgttatcttaccaactcaggcaccagactaaaccacgcccgactgctcgcctatatgggctcacgaagaggagagttgccctgcgaagaatcaaaatgggagcggttagat |
| | | attgcggcaagtgcattcaatgtgttgctcgctgaacgattggctaatgaaatacatggacccatcgacccgttcgaggccgtatgggtgccgaggtccttcggcgcagaag |
| | | agccgagattaaaggtgatgcctcaacctgaggatttaatagcgcatcagtacttactaaatgagctacttacagaacgctgggatgcttccgctctcggtgttacagcattca |
| | | gccagtgcataccagctgtccgctattaccgcgaagaaagaaaaactgttacgacaggaatatctaccccctcagataacacccaacctattatacttgaacagacgctaagt |
| | | ttcgcctatcaaattgatatggaggttattgagggcaggcagccagcttcagatcagggaatgtttcgtccgttcctagactgctggcgagactttatgcagtcccttaaaaatc |
| | | aagccaaatctataaattacgtgcatgttatccgcctcgatgtcagtcgatattacgaccgcatccgcagacacgtcgtaagagacagcattcaaccatttatacaacaagctct |
| | | ggaaactgtcgctgataatgcaccggcgtttgctgaactgatgaaaatacaagcatctgcggatgaagcagcggacaaatccgcaataattgtcgagcaattatgcgacatg |
| | | ctctttggctacccataccttagccctgataacgggagaattaataaatcagatcccttacgcggtattcctcaaggcccagtaatctcagcatggttaggctcagtggctttgttt |
| | | ccagtagatctcgcggcactggaaatgatgaacaaatacaatgtagacggggaaactcatctagggtatgcaaggtatgtagatgacatagttttactagctagcagctccgt |
| | | acttcttgaggaactgagagagctagttgatcaaaaaactcggagcttagacctggcgttggtcgcgaaagctgacgctattccgccaatgtctgctgaggaatttgcagatta |
| | | tgcaaatcaagggcgagctttagaagcatctggtccagcgtgggaaccaccgttggctggcgatggtgaagcggggtgggagttttggtcaggcactcccccctcagata |
| | | gacaatctgccctgcaactgctatcaaattgggagatatacaaaagcccaatagaaataatcttgcaaacagtgaaaacgtccttcctagctatggatttacgttctagcgagct |
| | | tgcaaagggagcaaggctaatatggtacgttgtagcatccgacctcctctcagctgacattgatccaagcgatgcggcagatttagcgtgggaaatttatgatcgctattggaa |
| | | ggaatgtactgaggagtgtgggtggcagttaaacccggatagtttcggatgggaggcaccgaatctgttcgcacttgagggactggaaaagcttatagatcataaaaatagc |
| | | ctccaatcgggtttaactgctttagaaaataccgttcggcacaaacgcatctctttcctagctagaaccgtgcttggggagcggttcaaactgcatgctcttgaaagcagctcta |
| | | cgcttaagcaccagatagataaaagactagatctcctcgaatggaaagcgtcaaaatcgtgcggaatgcccgttcgtagaactaaatcctacgcagagcgatcaatgtatatt |
| | | cgctcctggcaacccttcaactggttccatgccgcagtagaagatttcatgctcgcggatcagtccagcggatccgacccattgagttcatatgtcactcagttccaatctatag |
| | | aaaagagcatcagacctaatcacgccgcttcttatgagttcttccggtatttactgccatccgatggcagcgatagcgatcttgagtttttctcaaaaacagagaatcgatactcc |
| | | ggcttagcaattcagattttggttgcattagtccctcgggaaagcataatacagattctctcaaatagagcgcgcttactttgtcctctagaagctggtaaaaaactattagtcatg |
| | | ccccctcttcctggcgtcaatcagcaacgtatagttgcttgccagatcgatagctcctcagaaaacaaaatcaaaaaaatcagctcgtttgagtgctatgaaatagattcaacta |
| | | aaaccaataccacatctctagacttttttggtgcaaactctgcgggcgtagttgtgcttacacccacatggaacaccgaagcccaacctcaatccgccatacttcgatcaaact |
| | | cagaagtcccgaaaaatcttttgttggaggtatttgagaaaccgtcaaccggtttcccttccgctattcagggattgaagcacgtagcctcactatatagagccattgtggtaata |
| | | atggctgaatacgagaggcaaaatgatggtttagagcttatacccgcttggccataccttgccacagatatgacctctgggaactgctacctaatttgtgagggcgtaacgaa |
| | | aggagaagtaggaaaccgagcatttgtaagagacggtgggcgggccctaagaaccattgagataccgatatacgaagcccagttgtggcgagccggggttgcgctaagc |
| | | gattacataggcctgcacgacgatattgctaaatttagctcctccgaatccgaaatacctttggatgcgacaacgcttgccgccccgtcacagtacgtgctacgaagccaactt |
| | | cgtaaactgaggggtgcctttgctaactcacaaatagggcggcgcgttatgcccccaagttttcttccggcaagtgttgaacgtgcgcttgagttattggagcattttccggaa |
| | | gactcagatagtacaaagatgcagctaatgcatctgcttgccactgaaaccgaaactgcgggaatgcgcgtccgctatgagaaaaatattgaggtcacagagctcacggtat |
| | | ttctacgtgcggtcgccgacagggttctaacgaaactacccttaagcataggtgaggtcattgctgcaccgactacagcagtcagtggcctgaggagagacctgagtgggg |
| | | tcttgacccttgccagaagcatatggtcgatggatgaagaagaaaaactctctccaatttttgcgtggaagatttttcgagctggaattgtaggtattggtatcgctgttgctctac |
| | | gggggattatagcttcactaagaagccacggggggtttgcacgctttgagggatttgattttccagcggaatgggagcttccccctgccacagcagttttatccgaaccggcg |
| | | acaacagataaaaccactgatgaaaatgtaagcctcctcgaccatttccgggtactcgtatcacatctcggacaccgaatgaggttggacgacaacggcgagccacaaatc |
| | | ccagaagaaatcagcacagaaataagaaaatacgctacagcattagcgggcctcactactaaagactcaactgcggtggacgcaagcgactggcctttctttgatatcagc |
| | | gaaaaagtttttgataccctaaatatagaattattagagaacgtcagcaatctaatcaaaaacttagattccgcgcttggtctccaggtaattttggttacgcaacaatcatacggc |
| | | ttcaatgctcaaaccaaacgcttcactgactcaagaggacttgcatgggatataaagccatggatgatctcgcaatacccattgcgtgctcgccacgttgaggagtgttttgatc |
| | | aagaccgtagaatcgtacgtgtatggagcgagatttacgaaaaaaacagtcaacgcctgctttctatatcagtactaggcgagcctttcgcatcaattgcactatgtaaggactt |
| | | ggaatcgccttatgccgagactaaaaatgtagacagcaagcacaacactgtattaggtcctagcgagcagggttctgaaagcgcacccatagatatttcaccgattcttgaaa |
| | | ctgctgagcctgaggccgagactgccttagcagacacacaattaataccaaccccaaaccaaactagcactgaagacagctttgataaaatagatactgagcgtaatacaac |
| | | acacaataaaaaactaccgcttaccgacgcaacactcaacgcccgaaagaattcatttagaaatagccagctaacagcctggagcgataggaagtccaataaaaaccctgc |
| | | ccatgttcgggtagctctatttcagtgggaccaagagctgagctatgcacaccctatggtggaggccaccccacaaaaatggcctttcagttccgtctgtaaaccagcagtttt |
| | | aaaagaacttaaacgcctatataactctccctatcaagcccttttgaatgcaactgaatctgccggtcaacaccacctatggaaaaacgaaaatatttccctacccagctggggt |
| | | gagcttcgtcgtcggcgattattgctcaacgcagtgaacgcatgccagtcatttggcgtggacttattgatacttcctgaatactcagtccgtgcagaaactgttaagtggttaaa |
| | | agaagagtgcttacccggaaagacggtagcggttttagcaggaacatttttagctttcgactccggtccgccccccctaaaacaaagcgcgagcctcaacctcttgtggccc |
| | | gtaccgcgtgatattgccgaatgcctcaaaccgcttgcacccaaaacaaatgaagatgctatgtccttgagtgacaagattgacaagggcattgtattgcaatggggcagatc |
| | | aaagaaataccgatcagtagctctaaatgagttcatccggcctggaactgatcctctcacccccctgttcatgcccggaaaaataatagatgaattgagacgtgcaaattggg |
| | | atctggacgctgatggtgttgttaagttgctagccaacacagagttgccacttgcgaatttcatggagctgatatgctctgagattttcctgttcacgagcccaaccaacattcca |
| | | gagatggcaagagattatgtttcaatgtgtgcaagatttggcttcggcgctgcagaagctcaagtctgggcggatctcaaactactatctaaatggctttcggtctgttccaagc |
| | | ctggtggtgccgactctagacgatcaattttgatcgtacctgccgcgaccactcgtactgctgattattggatagcaggccaagctggcttgcttgccgccggcactacaactg |
| | | tatttatcaatggcgtaggatctgggcttaagggtggcagttgttttattggcagagagagctggaaaacaggggctggttctcacggttacattgagaccattacgccatacc |
| | | atggctggtcaaaaggaatttactataatagcaaacatgacccactgagcgaaattgatcaagcattggtgatcgcagatatcgatcctcataacatgcttgaaggcaaaccta |
| | | gacctcagatgctgccagttcccttacagctagtggcatacctaccaatcgttgaaactgtcgacgaaacaagcttggaccaaactctctgtgacgcagttcaggttgaccata |
| | | acaatattgcaagaattaatcagggtcagcgattgggtggacgacttaaaagtcgaaatgagttctggcaacttatcacgcaaagtataaataatgatgtcgacaacgactttat |
| | | cattaacttcagtaaatactttactgatgggaaagcgattcttgagcgagcaaactctttcttcaacaatggacaccaacagcctttttcatcggtagttaagctagacctgctctg |
| | | ctctccggcactttacgactggctagaggccgatatgacgttgcgggagggtgaggcgttacccaacatctcagtcccttcatggaccaaataa (SEQ ID NO: 390) |
| 32 | TOPRIM- | atggatcggtttgacattggtgaggtacttgcgaagtcgcctttagatgaagtagtacggcgcctcggcatcgagaccgagaggcggggaaaccaactcagtgcaatctgc |
| | RT- | ccatttcaccaagacactcgaccgtcgctgcgtttttttccagcggacagcagatctcccgagcattttcattgttttgcgtgtggcgcacacggccatgcgatcgacttagttaa |
| | nitrilase | gcaagtccaaagtgtagatttcttgccggcggtgcaatggctttcgcagagctttggcatcaaagacatccggcgacagccaaagaatcagccagatcgcaaaggcgccat |
| | (UG10) | cgaaggcgcacaggcattcgcgcttcggatatttgatgagcaccacgatacacaacgattccggacttggtgcgaagagcgagccttcgaggctgatttcctgtaccgcca |
| | | gggggtgcgctgtgtgcctcactcggttctcgtgcaagagttggcgtcgagaagcacaggcgagcgtgttgagctgatcgatggcctgcttgctctcggcctgattaagcgc |
| | | ttgcaacaagcatcccattcggatcagtacaagcttagctttccagatcaattccaattgcagttccaagactacttccacgacgggcgtgttttgatcccgatctatggtggtgc |
| | | cgcaaagcgaccggaactggttggcttcgcgggacgggcactgctggctgtgccgccagaaggagtccccaaatacttgttaagcccagggtttcaaaaagccaaatacc |
| | | tgttcaatgcgccgagtgccttttcgtcagcaacgggggaactgagggacggcgacactgcaacgttatatctcgtggagggcttcctagatgccctacgcctgcaggcgtt |
| | | aggcttgaacgcagtggcgcttatgggcacctcactcagcaatgggcagttagagctgctgaagcacttcgttgatggcctgccacagggcaaggctgagtttgtacttagc |
| | | atcttcctcgacaacgataaagctgggtttgcagggacggatcggttggtgcgacgcctgctgggtttgtccggagttgatctgcgctggattggccttgatggctataccaac |
| | | cgtccgcttggcaaggatccggacacttgtctaaaagtgctttcgagccgagtggaggcaacggactggttgcaggacttcaatcggccggccgaggcagccttgctggta |
| | | tccgaattgggagacattgatgcctccgaactgccgaacgaacgctgggctgaactgaattccagtgctcgggagcgggcggtgtacaagactgcgacgactattcgaca |
| | | ggttcgtggctcgcggcctttacagggcgtgattcagcgactgaaggctacagaagagagttgggctaccgaactttgtgaattgctgggtaccgttgaaggaacacagcg |
| | | gaatcggagttccgtgttgtttctccagggcttggaagagcgcctctctcatgcccgaaatttggcgtatcacggatcgcgccgtggcgagctcccatgcgatgaagaatctt |
| | | ggctgactttggatttgagtgcgcgcctgtttgatcgcattgcccaacaacgattggcagagcgtggctggatccaagccgccccatatgatgcagtccacctgccgcgcaa |
| | | gcttacggctaatactacggtactggatgacccgcgtcgcaaggttatgccacacccggccgatttgcacttgcaacagttgctgctgaatgaactgctgacgcagcggcac |
| | | gacttgctgagtgtcgaaggcaagaccttctcggaatggattcctgctgttcgctggttttctgccacccgcaaagtcgaagtgactgggccgtttgacgacctccccgctgc |
| | | agaaggggaggagaccacattgagttttggctaccaagtagatatggatgtgctggagggcagcaagaccccgtcagaccaaggcatgttcaggccctacgggcagtgtt |
| | | ggcgcgacttcatgagcagtttgagcaggcagtgccacgctatcggcggtcgagtgcatgtgcttcgactggacgcccagcgctactacgactccattcagcgttatgtggt |
| | | acgcgatgcactactggactcgatcaaaggggctttgacgggaaccggggcgggcatcttcggcccactacttggccggagcgaaacagctagcacgcaggaggtcgc |
| | | agaggctctggtcgacaaggtttgtaacttcctctttggccaccaataccggcccccaaatacaagagctgtcggctctagtctggatgcgattgggattccgcagggtccgg |
| | | ttctatctgcatatattggtaccatcgccttgttcccggtggatgctgcggcgcgcaggttcatgcgtcgcaacgtccgaccggggcaggatggtatgaacctgccccgcgtg |
| | | ggctatgcccgttatgtggacgacatcgtgctgttcgcagacagcgaagcgctgctggccgagttacaagaggtcctccagaccgagtcagctaagttgtctatctcactgat |
| | | aaacaagggcgaacgcattagatccggcacgccagagcaggtgatgcaccagctcaatgagggacgcagtctggcagcttcggtgccggcttgggaaccaccattcgtt |
| | | ggcgatggtgagtctggatggggtctcggcggcgatctgccagacgtagaccggcaatgcgctttgaaaatgctgcgacatcccgcactgatggacgagccgaaattgat |
| | | tcaggagcaggtcaggcaagccatgcaggctcctgacctccgtccaaacgatctgggcctgtgcgcccgatggttgtggtggcaggtggccactgaactgtccaacgaat |
| | | ctccgcaaaacgacccaagctcggcttggagtcgctactggcagttgtggcgacatgtttgcgaggggcacgactgggccggggagttcgaacgaaggggctacgcac |
| | | agctatacgctgtggaaggcctggacaaattactcgattccaacccttggatggagaatgaacaaacccatagcgaagtaccgcagaaacgggcaattcgtattgggcttgc |
| | | gaagctggtcatctcggcggggttcttctcggaggtgcaaccttctgagaataacgtgcatgtccagcggcgcgcgcgtcttgtggccggtaaggcgcggcagctttccgg |
| | | cgggctgtcgaccactctactaagtcagccacaagacacgcagccggttacgacgatcgagtggttgtgcatggctgctgaattggtacgtgcggcccctgtcgatattgct |
| | | ggcgctgaaggtacgcccccgattctagcgcccatcaagaatcgggttgctcttggcaccgtggatgctgtggcatcgcaggtctgcgaagtgctacggcttgcggatact |
| | | caggatgggaagcttggtgacgtattacccaacccagtgcaggatgacgtagcgcggctagcacttggtttggtgatagataacgcgacccccaatcagcggctggctgtt |
| | | ctgaccaagttcccgggactgctgagtatccgcagtaacggtgacgagctttccttggttcagcgtttacctatcacggagataacgtcactgtgggccttgggtgagccgca |
| | | aaacggggctcgatatctctaccggttctccttgcccccttcgccccttgcgtctcgagacctggcctgcgttgaacttgcgagcgatggcatgccagaggccaggttggag |
| | | gcattgagcttcgaatctacgtcgctcggcccccaatcgtgccctcaccaattggtaagagagaagagcattgaaagtgtttcatgggcgaagtttgacttggattcatcgccc |
| | | aatttgagtcggactgaactggcggttcgcctgtacgtcgcgctagtggccatgcagcggaaggacacaagcgatgctgatctaatgtacgttccttttgcaccacagctattc |
| | | cgatcaggcgatgccacgcagccaacgctgcacttggttgcagaacctgtgaagcgccatacgctaggtgtgagcgcctggtaccgggattgcgatgggcgggtgcgta |
| | | cggttagtgttccacacgtcggtgctgacctatggcgtgcgggctgggcggtggccgacgcattgggcatggcggtagacatgtcaggagaaaccggtctgcgcgatga |
| | | gcaactgtcggacaagacgccgatctcggttgagcactatctactccgtcagcagttgcgcaagctgcagggtgtttacttgtctgaggcccagacattgcgcaaagatgaa |
| | | cagaccggcctgccgcgcacagtaatgcgggcgctgcagcttctgggcgaattcgatggtcgtgcggaacctgaccagcaagtgcgacagttactggttatggaggcgg |
| | | aaacacgggcgatggccttgcgtctacagcagcaggggggcgagagtttgcacgcgctgttgcatcaggtgtttccagccgtgctgaacaaactgcccttgtgggccatcg |
| | | attgcttggccctgcctaaccagcccgccgaacaccaaccgctgcggccagatttggcactcatgctgtcgttgtgcacggccatggagggttattggggccaggggggg |
| | | gcagcgcatcaccatacaaccactccggctctgcgtgcggcgctagctttggcaacagcgggagcagggttgcgtgggagcgttgccgcgctatggggtctgacacagg |
| | | cgcgtggtgccctgcggatgcccgagcgccttgacctgccagccgcttggccgttgcctgatatggtgcgcacggatccgcagtcggactacaaagccatgcgccaatgg |
| | | ctcatcgaaggcgattggccagcgctgtgccgcaccagcccttggcactggatgctcgcgctgaccggtctgttgggtgccaacttcccacaggcttttgaactgcctcagtt |
| | | gcagcaggtctttaccgcgttggcagcttggcagagccaactaagcgctgaggacggcgcctccgtatggccttatgatgggctgccagtactggatccgcagcagtggg |
| | | cgacatttctcgacgcattgcctctggcgatcaggcaaatcgacgatttgcttggcatgcgggtggccccctgtactgccccacggtatcgccgcaacccccataccggcga |
| | | gttcaccgatgccagcaatcaagattggctgcttggcaagtcgcagttcacaggactaggtgctgttgaccgcattgcacggcgtaccaccggcggacgcattctaaacgtc |
| | | tggacagagacccggagaaaggctgacgatgagctactggcagtgcatacgctggatcgaaagctgggggcctggttggaacgcgccgatcaccccgagacagcgta |
| | | cgacggcacgggcgctcctgtggccatgccctcggagaagcctgctggcgaaatcgtcgagcaggtattggctacctttgtgccggatgtcgctgagtctgcctcagacct |
| | | agcccaaagctctactgacgaactgacggagaagcctactggcaaaatcggtgagcagatattggctccctctgtgccggatgtcgccgagcctgccccagaccttgccc |
| | | aaagcgctgctgacgaaccgacggagaggcctgctggcgaaatcgtcgagcaggtaatggctccctctgtggcggatgtctccgagtctgccccagatcttgcccaaagc |
| | | tctactgaaaaaccgacgatgcagcctgtggctgagatggacggcggagccaatattgagtacagcaaggatgttgatcgcttggcggagcacctggacatttcacagaag |
| | | cagtcccgaaagagtcgtgctgatcacaagaattcgaaggcccatttccgcgttgcattgttccaatggcaggtcgaggacacctatacacatcctctgagcgaagtcggttt |
| | | gcgaggcctgcccattggtgaaggggctaaggccgaactgcgtggaatggtcgctgccaatggtgacctctcggtcgctgacaaggccgccaaacggggtgaggagca |
| | | ccaatggaccaacaacgtgaaggtcatgtcctggcatgagcacagacgccggacattgatacgtcaggcattgaatgcttgcaaggatcttggcgtgcaattgcttgtgttgc |
| | | cggaggtctcggttcggagagacacggttgagtggctcgaaggcgtactgaaagactttgaagggttggcggtactggcgggtacctatcgccacttttccaccagagcgg |
| | | aagaccgcgaccaccttcgcgcaccgctgacgttgctctggcggcccgagaccgaaatggccaaggcgcttgggcttgggaatgagaacacgacattcaagttcgaacg |
| | | cggcaagaagtatcgtgcggtggctgctaatgagttgttccggcccgatttgagtcagctctctccgctctacacagaagtgaagctgatggaggaggtcaagagggaact |
| | | caaccgtcgaggacgaagcatgcttgggccagatcaactgcctgagctggctcatgcactggtgcatttgtcgccacccctgcgctattgtatggaactgatttgctcggagc |
| | | tctttctgctgaccagtccggccaattttgaaccactgaggaaagaggtgaacatgctcttgcagcggttcccttcgtactctgaggatacgaagaaattgattcgggatgacat |
| | | cgaggcggtcggtgagctgctgactgttgcccagagaaaccgggagcggcgttcggtgcttctggtccctgcatttacgagccgcagtaacgactattggcacgcagggc |
| | | aggccagtgtgttggcttccggcacggccactgtgttctgtaacgctgcccacaagaacagtgctggtgggagctgcttcattggcattaattcagtgagtcgctcgtcggag |
| | | accgcagggattgttaactctttgacgccttatcacggctggcaaaagggcatcctgcaggcgaactctgaaggggcgctttcgaagcatgatcaggcgcttgtggtcgtag |
| | | atattgatccagtacatgtggtgagtggtaaaccgaggccacagctgttaccagagcccatgtccttggtggcctatctgccagtgatcgaactgatggacaaggaccaaac |
| | | cgctgatggtgtagtgcgtgcattggaggcggaacttgaggatccaggcatggggggtaaagccagggagctgcttgcggcaacgggcttccatgcgcatgacaagtttt |
| | | acagggcttaccagacgcttctcaatgaaaaagggtctgacatcagcaaagcgcacggcgcaaaggcgttggatgattttgtgaagttcttcgcagacccggatgcgttgc |
| | | gcaagcgtttcttagcttggcaagatgaacgacatcagcagccgagtctcgtgtccggaagcctgcagttggagccggcatggctcgatttcttggttgcggatatgacatgc |
| | | atcgatcagatggccaaagtgagggtgccgccatggaaggagaacttgggaataggtgggccttctctagcgagtgactcgtga (SEQ ID NO: 391) |
| 33 | RT | tctccacttcttcaaacatccgtatttatccataaccgcactgttttataaaagattttttgtttttactgttcgtattagtccataactttccagtagaatccagtactaaatgtgtatagg |
| | (UG7) | attatgtatatgttcctgttcgattttggaattctatacacatgcccctaaatgatatgcagattcgccgtgctaaacctgaagctaaagcctatacacttggggatgggcaagggt |
| | | tgtctttacttgtagagccaaatggaagtaaaagctggcgatttcgttatcgctatgccggtaaacccaaaatgatctcgcttggtgtttacccaacgatcactcttgctgatgctc |
| | | gttcccgtcgtgatgaagctcgaaaacttgtggcagaaggaaagaaccctagtgaggttcgaaaagagcaaaagctggctctgcaaacagagtcagagaacgccttcgaa |
| | | aagatagccagagagtggcatcaacagaagtctaccaaatggtcggcgggatatgcatcagacatcatggaagcgtttaagaacgacatttttccttatgtgggaacaaggc |
| | | cagtgggagagattaaaccgctagaactgcttaatgtgctgcgtaaaatcgaaaagcgcggtgcattagaaaaaatgcgcaaagttcggcagcgatgctcagaagttttccg |
| | | ctatgccattgctactggaagggctgagtttaaccctgctgcggatctttcaagcgccctcaatgtacaccaatcaaatcatttcccgttcttaaaggctaatgagatacctgattt |
| | | tcttcgcgccttaaacggatataccggaagtcggcttgtcctgattgccacgaaattgctcatgattacaggtgttagaaccatcgaattacgtgcggcattatggtcagaatttg |
| | | atttagataacgctatttgggaaattcctgctgaaaggatgaaaatgcgcagatcacaccttgtgcctttgtcgactcaagcgttagatttgctaaatgaactcaagatgatgaca |
| | | gggaagtatagttatgtttttccggggcggaacgatccgaacaagcctatgagtgaggcgagtattaaccaagttatcaagcgtattggttatggtggaaaacttactggtcat |
| | | ggatttcgacattccttatctactatcctccacgaaaaaggatatgattcggcttggatagaaatacagcttgctcatatagataagaataatattagaggtacgtataatcatgct |
| | | caatatattgataaacgccgtgatatgatgcagtggtattcagattatatttttattaaggagaatgtgaatgagtaacgagtttgatagtagtaaactagaaaattgctttgagcttg |
| | | cattggaaaatattataaagcacggcgatacagatattttcccttacccatttgaaagtcggttatttgaagatgataaggagaaagtaaaaactgcattaatgcaaacatttaatg |
| | | actttgaaaataaaaggatcgagattccaccaaacataattaatagcttttcaagtattggttattatggttacaggtgggcgacccaaattgatccattctggaatgctttttttcttg |
| | | ggttagttttaaaaatcgctgatgatattgaaaggaatagatctactaaaacgcaggtttattcatatcgctttaaaccaaaccttgctgatggttctctttttgataaagagatctctt |
| | | ggagaaaatatcaagaagacagtatctctgaatgttctaacgatgaaataaagtatgtacttacatgcgatatagcagatttctatccgcgtatttatcaccaccgtttagaaaatg |
| | | cgttagatagagtcgaccccaataaagattactctgggaaaatcaagaaattactacagacatttagtgaaacaaaatcatatggagtaccagttggatgtcctgcctctagaat |
| | | attagcagaactagctctagattctattgataaattattgtctatgaatagaatcaactataagcgttatgtcgacgactttgttattttttgtaactctagagaggatgctcataagatt |
| | | ttaactttgcttagtaaaaaactgatggaaaatgaagggctaactttacagaaacaaaaaaccaatattgttactaaagaagagttcctttcagtaactaaagctaagttgcatgg |
| | | taatgatgaagatgaagaatctcctatgaaggctaaatttatgagtcttcctataagattcgatccttactcagcaaatgcgatagaggaatatgaagagataaaggaatctttaa |
| | | aagattttgacttgttagctatgctgagtagtgagttacaaaaatcaaaaattaaccaatcttttagcaagcatttgataaaggcattctcagcaacatcagatgaaataataagta |
| | | gtgctttcaaagtaatgtttaataacttgcatgagttatatccaatatttacaactataattcaagtagctaactccaactggcaaaaattaagcacagaaaccaaagatattattctt |
| | | gataaaataactgcactaattaaacaagattcatatattttgagtactgagctcaacttagcctatgtagcccgaatgctctcaaaagaaaattcagaaaaatccaccctaatcctt |
| | | agtgaaatatacaataacaatccagaaagcatcttagtcaagaacatagttacacagtcaatggcaaaaattaattcttacgcatggctttctgatatcaaaaaaaatttctctgca |
| | | atgcatccgttgcagagaagactattgatcgtttccagttacatcttaggtgatgaaggacggcactggagagagcataataagaaaacattcaactttgtagaggtgatttaca |
| | | gggattgggcaagtaaaaggcataccgcaagaaatcttgaggatgcgctatgatatctgaattaacgttttctcgaaaattcacttcattttggaatcaattgcttccaaatgctaa |
| | | taatttcatacgcatcattaacggcagtctcatcgaggacgtttatcctcctctagatgactgcgctaataggtcaaataacgtctttgttaatgagtgcgcatttaatttatataggg |
| | | caatacagaatgattcgttagacagaaatattctttcagcacatgatatcttccataatgctgattttcaggttgtttttgaaaaaacaaaagaatatctacagcggttcgcttacggt |
| | | tctaacttcaagctacccttaagcatggttgagtacaatgccataagggaaatagcaagaaacattttgtctcgatatggaatggaaaaccaaattgaagtgtctccacaattcg |
| | | atggatgcggagtaataaataattcatatggcgatatttattattcaaatgttcttgtggaaataaaatcaggagataggaagtttagtgtttacgatcttagacaggtgctaatatat |
| | | ttcactttaaacttttactcaaaaaacaaaagaaacatcaagagatttgagcttttcaatcctcggatgggtatcacttatagtgataccattgtcaaccttagcaaagagttggcgt |
| | | ttattcaacctgaagaattgtactttgagataatgaattctattacagaagaaaatttcatagtaactgaaatgcaacgctagatatcatgcagaccgctacaatccattgtagtggt |
| | | ctatttctaaacgttccttctgacgaataaagccaaaataccaaatagaattaaagaaaattataatatcagccttagcgcgcaatgctccccccgccacgcccgcccgctttgc |
| | | ggggcggttttaatgcagttgcactgacacgctcaga (SEQ ID NO: 392) |
| 34 | RT | atgtcatataatgaaaatgactgggataaagaacatctactatcgtttccaataaatgtgaaagcggtgattgcacatatgcgtcaggacatgagagacgattggtttcctgatc |
| | (UG9) + | ctctatcctataatgacctatttgaaaaagcggatgatctcagagaagtactaatggagttgctgcttgaaggtaatgggcgctatgaagggaatctacgaaatttatgtaacata |
| | PolA | cccaaaaaagggcttggcataagatattctctagaaactgatttttacgatagatttatttatcaggcaatttgttcatttttaattcctttttttgatccattactttcgcctcgagttttag |
| | | ggcatcgatataacaaaaaaagaactaaggaaaagtacctttttaagtctaggattgaattatggcaaacttttgaaggtgtaacctatactgcaatcactagtagtaaagctttg |
| | | atggctacagatgttcttaattattttgaaaatatatctatcgataaagtcaaagaaagctttgagttactaatcccccaggtgaaagcaaatggcgcggaaaaattaaagatcag |
| | | aaatgcaatcaatacactctgtgaattactttgcaagtgggggttcagtaaatttcacggattaccacaaaatagagatccttcttcattcatagctaatgtcatgcttaattctatcg |
| | | atcagaaaatggttgttttaggttatgattattatcgttatgtggatgatattagaataatttgcccagatataagtagtgctaggcgttcactaattgagttaattggtgcattaagaa |
| | | ctattggaatgaacatcaattcaagtaaaacaaaaatacttacatctgattcagataaggatttggtagcagaattttttccgtcacttgatgatagaagtataactatagataatat |
| | | gtggaagtcacggaatcgaagaattattgccagatctgccaagtatattcatgcaatgattaaggattgtatagagagacaagaaacacaatctagacaatttcgatttgcagtt |
| | | aaccgcttgataaaacttgttgatgcaaatgtttttgacgtacattcttcattaggtgaagaattgcttgatatgattataagtacctttatcgatcacccagcctctacagatcaatac |
| | | tgtagattaatttgtgctttgcagccgttagataaacattttgaaaaaataacagatttcctatgtgatcatgattctgcgatacattcgtggcaaaactatcatatctggttgacttta |
| | | gcctaccataattttaaatcagaccagttaattgagacggcatgtgagcggttgaatttaatttcaaatgatccagaggttgcggctgtatttatatacttgtcttgtattggtgagac |
| | | ggaaaaactcattccggtaatctctcaatttgatgccagttggcctaacaggcatcaacgaagttttcttcttgcaactaaagatttgcctcaagactcattaaaaaaaatagttga |
| | | aaaattgacaattaagcttaggaatacggctagaagggctacgccacactattataataatcgcccgttagcagaacggaagtttcctaagattgttgatctatatgacgaggtt |
| | | accacctatgattgatgctcaacctaaagtatttttatttattaaagattattctgagttaggtgaagataggtattttctattaaatgggaatgtcttctctgaggtttgtgcagagcaa |
| | | atagtatcacaaacagagctgattgtttgccacgattattggttaatcgctccgtcaatttggatgtctattgggtcactcccatctttgattgtagatgtagatgaattccaaattatt |
| | | gtatctggaatgaagaaagaaagattgttaagagactgcaaggatatcacgagaaggtcgaatatatatgaaggtaatgaggacttatgttctaggtattttaaaatatttaacc |
| | | gaactttaccttttgaagaggcggtttttagggactttagccttttactaagggaacattatctttcagttaaaaattatgcatctttaaatgatgagttatatcggtttgaaagtataga |
| | | gattcctgtttcgagatatgttataaattcaatttgcaggggaattaaaataaatcagggccaacttttaatacataaaaaaaaccttgagcatgatttctacactgcattgaaagaa |
| | | tactcagcaaaatataatgtacctcttgaagtacctgatgatcaagatgttatagagtatttagagcctatgggatatgattttacgggtgtagacgtggactatatccttaaatttgt |
| | | ccctatggaaagtaattacgcgaaagatgtattgtcgcttaggaaactatctcgatctagaaacgttcttaattctatacctttaagcacgcgccgtgcttatccgatggttgatact |
| | | tttgggtctattacttctaggatttatttaagagacccatccttgcagaatcttgcaaaaaagcatcgtaacatactaattccggacgatagaaagcgatttgtatatgttgactatg |
| | | atcaatttgaggctggaataatggcagctctttcacaagatgaggagctgttatcattatactcggggaaagatatgtatgtgggtttcgctgagaaacttttcaataatataaata |
| | | tgaggaaggacgcgaagaggttatttctgtcatatgcttatgggatgtcgatgaaatcattgatagatgcagcggtaggatttggtgcgaatagaaaggtggctaaggaaatat |
| | | tcaaaagctttgtctattttgaaaaatggaaagaagggatatggagtgattttgccagaagtggcaagattgggactgctaatggtaattaccttatacgtgatagagaggggc |
| | | cattagatggaaaagagaaacgttcatctgtaagtcaagtgattcaaggaacagcttcattaatatttaaggaagccttgatgtcgctggaagctttgaaagctgtagaattatta |
| | | ttgcctatgcatgatgctgttttggtacaggtgccgttagatttcgaggataaagttatagcagaattgcttgcaaatgttatgtctgaccattttggacaaaagattgtaggtaaag |
| | | cttctatcgacactttctttgaagattaa (SEQ ID NO: 393) |
| 34 | RT | atgtcattatctaatttagagaataaaaaagacgatggtctatttcatttcccaattgatgttgatgctgtgcttcttcatttgaaacaggatatgcgagatgattggtttcctgactgt |
| | (UG9) + | cttcagtatgaagaccttttttataagaaaaacaacattaccgaaaaagtagagggcaagattgtttctggacatggtgtctacgatactgacattcggtttatccacgatatcccc |
| | PolA | aagagtactttggggttaagatattccctcgaaacagacttttacgatagatttatctatcaagcgatttgtagttttttaatgccttattttgacccattaatatcgaatcgagtttttag |
| | | tcatagatacaatgaacatcgaaccaaagaaaagtatatttttaaaaatagaattgacttatggcaaaatttcgaaggcatcaccaagctagggatatgtgatgataactatctttt |
| | | ggtcaccgacttacttaactattttgagcatatttcaattggaaatatccaaaaatcctttatagatttacttcctaaagttaaagcgacaggaaaagtcaaaagccaaattagaag |
| | | cgccatccacactttatgtactttacttgagaagtggtgttttaataatcttcatggattacctcaaaatagggatgcatcatcatttattgcaaatatagtattaaccgccgtcgataa |
| | | agctatggttcaaaaaggctatgattattttcgctacgttgatgatataagaattatatgcaaaaatgaatttcacgcaaaaaaagccttgaatattctcatatttgaacttcgaaag |
| | | cttgggatgaatattaactctaaaaagacaaatatatactcttcgtcatcatcccaaagtgataaagaagaactattccctggtttcgatgaaagaagcattgccattgacaacat |
| | | gtggaaatcaaggagtaaaaacgtaataatcagatctattccagaattaactaatatgttaatcgaactaattgataaaaatgaaactcaaagtcgcaggtttagattctgtattaa |
| | | tagaattataaaactagtctcaactggattatttaaaagtggttcaattctatcaaataaagtagttggcgcattgattaaggcattatatgaacaaccggcctcttctgatcaaatat |
| | | gcaagcttttggttgatttaaaattcacaaaaaaacataaaatcgctttagaggaatttataaccaatgatgagctatgtatttacggatggcaaaaccatcatatttggatattattg |
| | | tctctaaagaatatttccacaaaaaaaataattgaccgtgccaagtgcatttgcaatatacaacccataccatctgaagcatccgcatgcttcatatttttagccatgaatagtgaa |
| | | tttaaatacctagataccttagctgacaaattagacaggacatggtcatttcagctgcaacgccattttctccttgcaattagaagctcaaaaaaaacttcatcaccagagcttata |
| | | aaacatgtactgccagcgatacaaggaaccgtaaggggggttaaaatgaacaaaaaattaaaaaatatttttattcatgcaaacccaaaccctgtctctttttctgaaatctacaa |
| | | tgagttaagtccttatgattgatcaatacaacattcttttatatctaaaagactttcaagctaaagggaaggatcgctattttctatttaaagaaaacttgctatcggaagtacaagca |
| | | gatgaattgtttaatttagactcacatttaatcactcatgattatacaatcatttctgagagtatatttaaaaaatgccataaactccctaataaagttgttgacattgtcgattttaagaa |
| | | atttctattacaagaaaaaatcaccgaaaaaaacaaagattcctttaagataaaagaaatcattaaagacgaattccaagacaaaaatgacttaatagaatactttgagatatttta |
| | | taagaagaagcctttcaatattgatacctatctcttatttgctcataaaatatcagatggatatgagcgtttactcgctgaatcgttggcattaggagagcaggatagatatttcaac |
| | | attgaaattccatgctataacgcattgtgcactcatctggctgctggcataaaaatcaacaacgaaaaattaaaagaatataagaacgagataaattatgattattttaaaaaaata |
| | | aagtcatttagtgaaaccttcaacttcatgtatgaaatgccttctaatgaaagcatcaagcgatatgtcacagagaagggatatagtcttagcgaagagtctttagattatataatt |
| | | gagtttattccaatgcctgatgattttggcaaaaaagttcgtgagttacaaaaaataaatgcaactagaaatacattcttgagcatgcctcactcaaggaacacaatttacccatc |
| | | agttgatgtaaatggctccgtaacttcaaggatatatttaaagtcacccaccattcaaaatatatcaaaaaattacagagacatattcattgctgataaaggatgcgcgttgagtta |
| | | tgttgattatgaccagtttgaagttggcattatggctcactttagcgatgacgagaaattaatcgaaatttattctgatgctgacatatacttaaaattctctgaggatgtatttggaac |
| | | cgctgagaaaaggaaaattgccaagcggttatttttgtcttttacctatggaatgagtaaagaaaacctcattaaggtcgtcgaagaaaatcaaggcaacattagaaaagcaag |
| | | agaattcttttcttcatttaaaaagtttgatgaatggagggcgcgtactgtacaacagttttcagacgaaggtagagtcgggacacttcatgggaatttcttgaagataaaaaacg |
| | | caggagatctctcaaatagagaaaaaagatcgtgcattagtcaagttatacagggcacaggttcattaatttttaaaaaaaccatcatcgaaatatctaaaattaaagatttaaaa |
| | | ataatcatccccatgcatgatgcacttttgattcagcatcctgatgactttaatgctgatataattattaaaatatttgaagatgtcatgagcgatacattaaaaaatgaaaggcttat |
| | | cactaaggcttcattgggaacttttatttaa (SEQ ID NO: 394) |
| 34 | RT | atgaatacattcaaagcagaacaacttctaacatttcctattgatacaaatgcaacattaaagcatctacgacaggacatgaaagatgactggttttatgatgcaattaggtatga |
| | (UG9) + | agatctactctctaataagactgacttgcaacgtgttttagctgaaaatcttaatatcaaccatggtaattataaatcaggtgacaaagctatttatgatgtgccaaaacgtgcattg |
| | PolA | ggtctacgctatactttagaaacagatttttatgaccgctttctatatcaggctatatgtacttttttaatgccttatttcgatcctcttttatctaatcgagtttttagccatcgatataata |
| | | aatatggtaattcaaagtatctttttaagcatcgtattgaattgtggaatacatttgaaaatattagctatgtttcactaattgatgataaaacacttttaataacagaccttctcaattatt |
| | | ttgaacaaataaatattgaatcaattgaaagttcattcattagaatgatagcagaccttaatgtatcaggggcagaaaaaaacacgattagaagtgctattagcactttgaaagttt |
| | | tattagagaaatggtgttataacgataagcatggattgcctcaaaatcgtgatgcttcatcatttattgcgaatgtcgttcttgattctgttgacaaaaaaatggtaaagaaaggata |
| | | tgattattttcgttacgttgatgatattaggattatatgtaatgatgaaatggaagcaaggagagctttgaatgacctgatttttgaattaagaaagttagggttgaatataaattcca |
| | | aaaagacagaaatactcaataaacatagtggaaataaagaggatttttttcctagtaaagatgacactatgactttaattgatactatgtggagatctaaaagtaagaaagttatc |
| | | gcaagatcgattccaattctttttgagtttttaaaaaatcagatcgacgagggaaaaactcaaagtagacctttccgttattgtataaatagatttaagaccttgatatcatctaattta |
| | | tttgaggctaaatcagttttagctagagagattgcagatacattaattggggagctagggaaacagccggtttccacagatcaattttgtaaactcttaatggatttggacttgtca |
| | | aatgagcaaaataaagtcatatctaattatatagtaaatgaaaatgtagcgatatatggttggcaaaattataatttaatactacttatggctcataataaatattttgatgataatttga |
| | | ttgatttttgcaagctgaaaattgaaaagaaaattaaaagcccagaaacaccagcatgttttatttatttggcatcaattggcttgcagaatgaggttgaaaagtttattgattctttt |
| | | gataacacttggccatatcaacatcaacgatactttttaatagcacttcaagacacatcaccaaaaaaattacaaccaatgtttggtaaggtaggatatcgtctaaaagggaccg |
| | | ttaaaagattaaaggaaaataaactatttaaaggcgagtcaatataccttaaggattttaactcgactttaattcaagaaatatatcatgagatatcaccatatgagtaaaggaaaa |
| | | gtggtttttcttgtttatcaaaaagacttttcagaaagtggaaaagaccgatattttatatttgataatgaaagtctttttgaggtaacagtacaagaactcgttagttataaatgtttca |
| | | ttgttacacatgacttttggttgatttcaagctctatatataaaagtgcaaatgtattaccgaataagattattgatgttgtacttttagcaaagattgtatctggagttaaatctgttact |
| | | agtgatactcaaccatgggatatatcaaaaactatcaaaccaatattctcaaaatctgaggactttaattattatatggatgtgtattataggaggaaaagttttgattttgacatatat |
| | | cttctttttgcacataagctctgtgaatattttgaaagtttaagtgaaacttcctatcaacaagaggaaacgagtaggttttatagtttagaattaccagtatataatttaatgactttag |
| | | ctgtttgtagagggataaaaatagataatgaaacttttcgagagcacaaggaaaacttacaattagatttttatcgagaattaaaaaagttttctgagaagcatgatgtattgtatg |
| | | agttaccaaaagaaggtgatattcgggaaaagttaattacattgaattatcatgttgatggcgtgtctatagattttctacttgatttcataccctccatagatggatatacggatgat |
| | | cttcgccgtttgcagaagataaataaaagctatcaaatatttaattcaatatcgagctcctctaatagattgcatcctatagttgaatctcattggacatcaacatctcgaatttattat |
| | | aaatctcctgcaattcaaaatattgctaaaaagtatagggatatttttataccagatgcaggtaagatattgagttacgtcgattatgatcaatttgagatcggagttatggcttatat |
| | | ttcaaaagatcctatgatgattgaaatatatacgagaacagatgcttatagtgattttgctattaaagtttttaacgataaaaataaacgaaaaagtgccaaggtaatatttctttcat |
| | | atgtttatggtatgtcaatggataatataaagaaatctacaataagcatgggagggaactctggcaagcttcaagattactttgaaaaatttgaggtttttgaaagttggaaacaa |
| | | agtgtttggaaagaatttgagagtgaaggtcgaattggtactatcaagtctaactatttaaaaagggcaggtgaaggtaagttaacagaaaaagaaaaaagaatttctgtaaat |
| | | cacgttattcaaggtacagcaacttatatttttaagcttgctctgttagaagtttcaaaagttgatgatatagatatattgatcccaatgcatgatgcggcacttattcagcatactga |
| | | aaaagtaagttctgaaaaatttaaagaaatatttgaaaatgttatgacagaagtattaccaggtattcaaggaaaagcttcattagaagatttctatatttcagaataa (SEQ ID |
| | | NO: 395) |
| 34 | RT | atgagtgaacaattcgtgtccgaggcggcaggaactccgcatctggcagagcaggatgatggtcttaaaaatctgaagttattgattgaatccttcaatacagacaaactgaa |
| | (UG9) + | ctccagcgaacaaaagaaactccaagaactccggtccattctttcaccactactaaaaaaaggtggcgttttagcagacttatttcaagacgggaaagacgttttagcatttcc |
| | PolA | gatcgacgtcgacagtgtcctgcaacatttaaaccaagatatgagggatgactggtttactgacacacttcaacacaaagatcttctctcgaacaaacaatcccttcatgaagtc |
| | | ctacatgaattgttaaatgaaggaaatggacaatatatcggctctttcaggagtgtttacaatataccaaaaaaagggctagggattagatactcgctagaaactgacttttacga |
| | | cagatttatatatcaagcaatctgtaccttcctaatacaattttatgatccactcttatctcatcgagtactaagccacagattcaataaagatagaaaatcagagaaatacatattta |
| | | aaagccggattgatttatggcaaactttcgaaggggtaactagaacggcactcagcaataatcaatcactactagcaaccgatctaatcaattgctatgaaaatattacaattga |
| | | aacaatccgcacagcgtttgagcgatcaattgaacatataaatacttccggtccaaataaagtattaattaggaatgcagtgcaaaccctctgcaaccttttgtcgcgatgggga |
| | | tacagtgaacgtcacggcctgcctcaaaaccgcgacgcatcgtcattcatcgcaaacgttgtcttgaatgatattgaccatgaaatggtgcgattagggtacgattattatcgat |
| | | acgtggacgacatcagggtaatttgtcccaacacgagagtcgcaaagaaagcgttgaccgagcttataaatcagctcagaaaggtcgggatgaatataaattctggaaaaa |
| | | caaaaattttaacccaagactcgactgctaatgaagttgatgagtttttcccaacatctgacgatcgaagcctcacaatcgacaacatgtggagatcaagaagcagaagggtt |
| | | attgcgcgttcagcaaaatatatatttcaaatattgaaagagtgcatcgaagaaaaacaaacacagtccaggcagtttcgattcgcggtaaaccgactaatcaagctgaccgat |
| | | gcaggcatttttgatattcatgcaaccatagcaacagacttaaaagcactcttaattagctcacttgaggaccatgcggcttcgaccgatcagtactgcagacttcttgggattct |
| | | agacctcaacgagcacgagctcaatgatatttacaaccatctcagtgatcatgagcgctcggttcactcttggcaaaattttcatctatggttacttctagcaaatcgcaaatataa |
| | | aagcactaatttaataacgctagcaactgcaagaatagagtccgacatacttcaaccagagatagcggccatctttatttatctaaagtgtgttggtgaagcacaagttttaattg |
| | | ataacatttccaaatttgagtctgcctggccatattaccatcagcgaaattttctattagcctgtagcgattttgatcataatcaactgaaacctttaatttctaagctaggccctaaac |
| | | ttaaatggaccggtagcagagccaagccttattttactaatggtatgcctttggtcgaacgagacaaaatagccatgcttgatctttatgatgagatcacaccatatgactgaatc |
| | | caaaaaagccttactttttatagctgactatacagaccaagggcaagacagaatcttcttatggtcagatggcactttaggtgaagtcaccatatctgatttagtagatcaaaagc |
| | | atgagcttgtctgccatgacttatggttaatcgccccatcgctctatcgggcgacaaacaaactaccatccaacatcacagatattgaagaacttcgaatcctcacttctggaaa |
| | | gaaaaaagaaagagaatcgagagacaagaaagacatatcccaactcctgtcctcgtttgtttccgaagaaactattgcaagatataaagagatttttaaccgtaagataccttta |
| | | gatgaagctgttctgtcttcaattggcgaagccctattaaaatgctcagaagttgtaaaaagcgatgcaaatactgccggtgaatgggagagattcatcacaatcgaacgccc |
| | | cgtaaacgactatctaataagatcaacatcagaaggtatttctatttctgaagaaaaacttagataccataaaaacaaaatagaattcgaattctatatggcattgaagagtttttct |
| | | tccgactacgatatgcctctagaggttccctccgatcaagccgttatcgaatacctagagcctaaaggctttgactttaccggcctagacgtggattacattttaaatttcgtccct |
| | | atgcaatcacattttgcagaggacttaattcgcttaagaaagattcaaaattcacgtagagtattagcagccattcccttgagccaaagtagaatttatccgatagtcgatagcttt |
| | | ggatctatcacctcaagaatctacttcaaagacccgtcgttacaaaatttggcaaaacaccatcgagacattttaattccagataccaacaagcagttgtcctacatagactacg |
| | | accaatttgaagcaggcgtaatggccgcactctccggcgatgagaaactattagagttatataacagtagcgatgtatatgaaattgctgcaaaagaaatatttgacgacaag |
| | | agcaagagaaagcaagccaagaggctatttctttcttatgcctatggcatgaagcgacaacacatccttgctgcagcgcagggctttggtgcagatcgccaaaacgctaaga |
| | | aattctttgagcaattcaagacattcgaagcttggaaagtcttagttcacgaagagtttcaccgtacgggaagaattggcactgcgcttggcaattatatgcaccgtgagcgaa |
| | | aaggagaactaacaagcaaggaaaaaagatctgctatcagccaaattgtgcaagggactgcctcgttaatattcaagaaagcattactatgcttgagttcaatatctgaagtaa |
| | | aactaaaactgccaatgcacgacgctgttttgctggaacatcccgcagactacgacatggatcgggtaatcaatattttttcagaaataatgtctgaacattttcaaaataagatt |
| | | caaggcaaggcgtcattaagccaattccatgaagatctataa (SEQ ID NO: 396) |
| 35 | DUF4297- | gaaatttcgcgacagagatccttaacggtgcgtcgagcttcgacggaattcagaataatgatggtctggtgttcggtgaatcgtgctttgcgcatggcgatctcctatcagaac |
| | STAND | aaaaccagtatgccggatgatctctaaaagtgaatggaccgatatgcagggatgcttacagtgggtcttcgacctttataagcatagtaaagaatagaatatgccaatgtacga |
| | | taatctgtgcactctattacctgcgcaaaaaagtacaccagaattgtttgtctggtttggcaaattgagatcattaggcggcatagcgaatgactttaaatgaaaagcccgattca |
| | | tcaataaagattgttaaaacaaaaaccttgcccccagcagagggcgagcgccgggcaatgcgtggctatatgggccaatatgaaagagccggtgcagccatttatgctgaa |
| | | ttagagcgtgggcaattggagtggataggcgtagcggaccgcagtgcgggtatcgttgatgatttagtacttggatttaatggccttatcgttgggcaccagttcaaaacgtcc |
| | | cgtttccctggtacatttacagtacagacactcttagtagggtctgatggtctgcttaagccattagtttgcgcctggcaaaatctttgtagtgctaacccaacgtctcaggtagaa |
| | | attcgtttagttgtcaacgattatccatcagttaacgacgctcccggaatggaagctccagctcatagcgctgccttccttgatgagtttgaacattatcccaaacgcacgcttga |
| | | ggaatggcgctacagtaactggggccgtttagtcgaaatattatttcaacattcctgcctaggtgacgatgatttcgagagattttttcatgcgttgcgcataattcatggttctgca |
| | | gcagattttatacaattccataaactcagtgcagaacaagcgagactggcgtctgatatagcaaaaatattacctcgactggtctccgataaacgagatagggatcgatggtcc |
| | | tgtgaagaactattatatgaactagggtggaaagatcccaccaaaacacgccacttacatcgttttcccatcggtgctcacgtccaacgcaaccgcgatacggaactacaact |
| | | tctccagacgatacgcaacacaatccagggctatgtggcattgattgggcctccaggttcggggaaatcgaccttgctacagacaaccctagctaccgagtataacactcgg |
| | | gtcgtgcgctatctggctttcataccgggcgctgcgcaaggtgtagggcgcggggaagctgatgatttcttcgaagacatttctgcccagttacgcagcagcgggctgcctg |
| | | gacttcgccttcgagacagcagccaatttgaaaggcgcgaacaattcggtgaactgctcaaacaagctggcgagcgttatcaacgtgatacagtaagaaccatcattattgtt |
| | | gatgggctggatcatatcccccgcgaagaactaccagcccattcgctgttaggggaattgccgctgcctgcagccatccctttgggcgtgacatttatacttggcacccagcg |
| | | actggaactcaggcatctcaaacccgcagtacaggaacaggctgggcatccggatcgtctcgtaacaatgcatccacttgagagagtggcggtcgccaggatggcagac |
| | | gttttaggtcttgattcaaccatttcgcgtgtaaaactttatgaacttagccgcggtcatccgctggcggccaattatctcattaaggcactgttatcggctgatgaacaggacata |
| | | tcatgcatcctcgccggagggatggaatttaatggcgatattgaatcagtttacgcatctgcctggagagaaatcgcaaacgaccctgatgttatgcatgtactgggtttcattg |
| | | cccgtgtcgaagctccgatgccgctgaaattgctggcaacaatcgtagatgctcaggcgatagagcgtaccttaaagaccgtccggcatttactcaaggaaacctcaaagg |
| | | ggtggactgtattccataacagcttccgtctatttgtgctctccaaaccaaagataacactgggcagtatagatgaaacctattcacaacatatttatcgtgaattagctaaactat |
| | | ctcgtcatgcaccagaacattcattacagtcctggctaacactgcgctatctcgcccggtcaggagagcgtgatgaacttctggcactcgcaactccagcatattttcgacacc |
| | | agtttgcacatggacgttcctgttcagagattgatgcggacattcacttggctctgattgctgcgcgttccacgtatgatggtgtaattgccacacggttattactttgccgtgatg |
| | | agatatccagacgaactcaagcactggagtatgccaatgaacttccgcgcgcgatgttaaaagttggcgatattgatgcggcgatctctttcgtccaggactttcccaatgcg |
| | | ggctatgaagttgttgaccttcttttggaacagggtgattttgaccgcgcgaaagaactgtttgagcaccttgagccattatctcaattgcatacccccagattcgagcactatgg |
| | | ggattcgcataatctacaagaattcaaaaaatgggcaaaacgagttgttcacttccgcgacgctgagcaaattaagcaggcaatagactatttgaccgttgaggggtttaaac |
| | | acgccacaagtgtatcaaccgatgaaaatatttcctctattcgcgaacagttaaagtggacagtggtcgaggcaattgttaactggcaatcagacgttaatattcaggatacctg |
| | | caatcagtatggcattcatgtgcaagagataccggttttgatgactcaggctggatttattgctagagacagaggaaataacaccttagcatcggaattatttaagactgccatg |
| | | gcattgtctgattttaatgatgtttctaatggggggcgaagatcgattgcattattttatgccacatcaggctgcaccgatctggcttcaaaattattcgaaaacctttttgcgcctgc |
| | | aatttcgatgggagacaatgaattagaatcaacaaaagcactgacgcttgcagccatggaacatgcgcaactttgcgttttgctcggcaaatccttgcccgacgtagtcacctc |
| | | aacacacgctatcttacgaccgctgcagacacatgcttcagaaacgggacgcttgttggggctgtccataataaatgcctcatgtattccttctggaaatattaaaatggtctgtc |
| | | gcatggtgatgagatatgtaatgcaactcaatagctattctggaaacgatacctatcaggctcaattggcattgacagctacatcaccactgatttgtacattaattaaaatttctg |
| | | cgctgtgtggtaaggttgaatattattcagtaataaatgaaattgataatgcaatgcctgctttaatattaaaaggcaatacactactccggcgtgaaatagcattggcaatgtatc |
| | | aggctgacggtgaccgtgaaagggcggccgccagatttgagcctatggtaaacgagttggtagaaaatacacctagcgagcaactcgagactctgtcagttctggcaaac |
| | | agctttgctgcaattggcgatgttgaccgggcactaaacttacttgcttcgatacatgaccactgtttaggctacgctctggcagcgcgtaaggaccctttatactctgtttggaa |
| | | agacatattgattttggccaatgcggcagacccagaacaccgtgctcaacgaataggtcagttgatacgacaggttgatggtatgaaggaaaccgagggagcatctgccgc |
| | | atatcgtttgacagaagtgttaatcaatgaagcaatgcgtatgaatgcgcacagtggttataccgtggcacagaaactcagcaactgggggctgattccatggccaaatcagg |
| | | taaatgaactggtaattggtatgctagatcgccgtcctgaaatggtgtttctctgtacacaaatttggtgcgggctatgccttccattctacattgaaccctattatcgtgaccctac |
| | | acatgtaggcaattatattgacgttgctgcaaatgcagcggggccttcatcaattgccaaactggtatcaattctattaccggcaatccaggttcatagtcgagctcacgagcga |
| | | ctcacgctaataaatcgcctgagcaaggcggcattaagacacggttataccgataaccaacttgataatgccattactcgatggacttcagaggcccccgaagcccgccgct |
| | | cctacacgccacaaacgtacgacgaagcttcaacccttgacgaacttcaacaggcatttgaatcaaatgattccgaacctgagtatcatgcgccttatcgtttttgtgagcttgc |
| | | agagtccgccgcattagacaaggtggtgaaaatgtatgagtgctggcattgcctgcagtcggatgcacgttgtcgttttttggttgcagagcggctagttaatgcgggggaca |
| | | cgacgttagccagaaaattagttgatgattacgataccagtagtgaccgggagatgtcatggagccaatggttaggaggaaatcgattccgtctcttccacgcgcgtaagcta |
| | | ctcgatggagcagcaattcatcatgaagcatatgaagacttcatcagttcaattgtggctgggaaagagagcaccatgtcgttgctaacagatatggcagacattcttcctgtg |
| | | atctgtgagtcgccagactggcccgccgtctggtctatcctggcagagcagatgtctttcactcgcgaacaccgtattggtgaacttttcgaatttggaaatgaaaatatgaccg |
| | | acgaagagttacttgcggaattgctccatttttcattacgattgcctatcaccgaagctcgacgacacgcagagaaaactgcactaattctggcggtacattcaacaggaggg |
| | | caaatcgtatttgagaacaccataacacgactcctgaacggcacccttgatgaaccattccaggcattgcaaattttgcttttgctaaaacagaaccactttgctgctaaatttggt |
| | | gatttagtctctggccttacgaatcatcgtgatgtagctgttgctgaagctgcgtgcttgttagcacaatattggcagctacctgtatcgattgattttcatccgttgccgttgaccta |
| | | tcgattggcactcgacggagaccctgatcatgaaaatgctctgttagatcctgtgagtggggcaatgcgtattgaagtcgacttaggatggacacaaatgcttcgtcccgttgc |
| | | acggagacttgcagagtttgctgattgtgacgaaatgaacatacgccagcgtgccgcaacgtttattcagcaatggggagggctggcagcctttggccctggagcaacaaa |
| | | aaaaatcgaatctcagttacgcacactctcaatgcaaatcacctatcttaagccccatgcttacattggcatactggcacttcgtcatgtcgctggagagctgagcttggcaggc |
| | | ttgctctcgccaagggataaaccatcgctactggaacaaatggatgcagtacttccgccaactcctcgccctgaaatgcaaatccggccaactggcattaggcgaccgctta |
| | | aagtcaaggatgccccgtggagtgaagctgaagaaatgtggacaaatttggttgacgaggatgttaaaccctggataggtcgtgccgacgaattcgtaatagccgaggtttc |
| | | acaattcaaaatgcatgatacccggcgtgctgaatatcaggtctatcgtattagcgcacctcaaattcatatttctgatgccaaattcatggcatggtatcaaagtttgcccgctgt |
| | | cgtttggctgggaaaaatgatcccacttgacgaagacctcgcaccgacaatagtcaggcgtgtagtaagctccatcgggacaatgtcttcgccgggatatgccattgcattat |
| | | gtcctaatatccagatgcatctgggatggcatgaatgctgcgagatgcctaatatttataccgaccagaactcaacaatcgtagcaagattagtgaactggcgagacgccgg |
| | | gccagtggatattgatgatgattatatatggggggaaggttgctatctgacgctttccaatgcaggcctgatacaagtcaagactctgttcggcgaattcaccgtgcgtaatttc |
| | | gcaagcagggctgttcggcaattgcgacaaggcgaagcgcaaatgataaagacagctcagaatcagttcccgatactgtagcgagacgatttcacaacacggttcgattac |
| | | ctgacttctccaaccatggtctgaagaagtcagggagtgtagatcatgccggcattctgtttctgaatggcgcaggatttcgggtcagggtcaccacaacaggcttgtccttttc |
| | | t (SEQ ID NO: 397) |
| 36 | DUF4297- | ttgtgcgtagcacttctccagtttttgttgaaacagataaagagactaaatcgatcattcgaacccaaaaatggccgatttgatgcagacaacgatttaagccatatctggtagcg |
| | STAND | caatcgtcacctatgacaaaagttacatacttgtaatattctgaattcaatattcttcgtgaaattcattcaatgcttctttgagtagtgttttggcgttatgataatttcctaaatatcata |
| | | aggttatcaggcggtgatgtatgaggcgatttgtctatggcgattaaaaacagcgcaatcatttatgcaggctatgattatcagacactccaaggtgtcaggctactggcggatt |
| | | ggctcaatacaccaactaaatataaccgaatagcatttgaggctgatgcgaaacaagttgatgctccacaaggcattgatgatattgtctgcgaacgtcaggatggtaaaaca |
| | | gatttttggcaagttaagtttacgccagataccgacaaagaagacaatcaactatcatgggaatggttactgaaacgtagtggtcatagtattcgagctcgttctatactgcaaa |
| | | aaatagctgatgctgttgataaagtacctgcggaaagaaggggagatattactcttttgaccaataaaatacctaatcgtgagatagcaacttgcttgcgaaataacaaaatag |
| | | attggaatcaggttccaattgctaagcagcaaagcattattcttcagttaggtacccaggaaagagcaaagcaatttttcgatatattacaaatatgtcatagtgatcaaagttata |
| | | cgcgattaaatagtattgtcccagaactacttcgcaaacataccaacgaggagggggtatatcgcctgattgaacgagctaaacgttgggctatccagcgtaattcaccttcg |
| | | gatggtggatggatatgtcttgaacatattcgtgcagtgatttcaactaatagacctgaacctattccgcagacttttgtcttgccagataactatattgttcctgatgcagattttca |
| | | cgacaaattcattgattcactttttaatcctactaatcgattagttgtcttaactggtgctccaggaaagggtaaaagtacttacatcagccatatttgtcagatattacaaactcgcg |
| | | agtttccttatattcgccatcattattttcttgggttagatgatcgtacgacagatagattaagtcccagaatcgttgctgaagacttgatgtgtcaggtcaaagcattttgctcacaa |
| | | atcgaaatgaaaaattatcatgcagagcacctacataaagtgctggctgaatgtgggcagatatataaagaagaaggtaaacgatttttcatcattattgatggtttggatcatgt |
| | | ctggcgtgataacggcaaagataaatctccactggatgagctattttgccaattgttaccgttgcctgataatgtaacattattggttggtactcaaccagtagatgatgagctatt |
| | | gccatcaagattgttacagaacagtccaagagaagaatggttgcacctaccaaatatgtcaggcgatgctattcgtaaatatctatcgggacaagttgaaagtggccgtatcgt |
| | | attcaattttcatcaaagccagtatgaagaagttttatcacagtgtgctgagttgttgactactaaaactcagggatatcctcttcatgttatctactcatgtgaaaaattacatgttga |
| | | aggtaaagggttatcgcactgggaaatagaaaacctgcctcgctgcgaaggcggaaacattacaaattattataatgaattatggaaaatattaaattacgagcaacgcgatat |
| | | tcttcatctctgttgtgcttttccttttttatggcctgccacatcattttctgagattttttctgagaggactgaaactataccgaatgttaaggctgtaatccatttgctttatgagtccatt |
| | | gctggattaagaccgtttcatgaaagcttgattgtttttacccgtagcacaactgaacatgagaatagaataaaattattattgccagcgctaatttcatggctggagaaaagcgc |
| | | acccaaaccgataaaaaattgttggtactggtcatgtcttgcttacaatggtgatccatatcctttaagaaatggcttaactagagactggatattggaacggttggctgaagggt |
| | | atcgacaggatgagtttattcgattactcactcaggctgaaacttctgctttagccgaagggcattttagtgaggcctatcagcatcgttcacgcaagactcgactacttaatgct |
| | | aggttgcaaatctgggatatgtcgacgttgggcgtttgcagtatgattaatgcttctgaagcattgcttaaacaatatcaatctacccagaatgtcagttcaccaaagatactggc |
| | | aactttggctatcgctttatggtttcgtaatcatttcgatgaagcaaagcgcattacaagattggcgttacaacgctactcaaatgaatcatccgtatataccaataaaaatagcga |
| | | tgagtcgcgtgctgacattcgtttattaatcaaagctgctgttttgactgagtgtttcgatgaaaaatggttggcaaccggttcagtacacaagtggagtgatagtaatattaatct |
| | | gcttatcgaatgtgcggaatataaatcagatataggattactattttcattacatgatgtttttaagcaaactgtcataaaaaataaaatagtaaatgcgattgtcagagttgggattg |
| | | ttgaacaaatagatttagaatactggccacatttttctggtcttgactccgctctgctgcggttatacagtcatttatccactgcacatccatgttcacttataacagagcaaggtga |
| | | aagtgaaatcggtagatatcatgttcatccagaagtatcctacgatgaatggttctatgacagccttttttatcgtcttaatgccagtggagattattgttggctaccggttagcacg |
| | | ggggaaggacaggaggaagtcagcagtcattttctccatttaaatgatttctcagatattattgctgaaagtatggctctaaatattcaacaaagcttcagcgatttttgttcacttat |
| | | tgctttggtatcagatcttaaagatcatcaaatgcaaatccaacagaagcgaatgttttttaaaactgattgggtaagcattgctttaaatttacacttaatcatgcattgcaagccg |
| | | gttaatacggaagaaattgatattattcttaattctgagcatacagccctgtatcggctgcataaaactattcttaactttcatagtagagccttcgaatctgatgcaatagcaaactt |
| | | tctggtatttgaggatgggaggcagaaggaaaaactacaagagacaaatgaatatttggcgaataatcttgagttgtcagagattgcgcttcattatgatctcaatcaatcaattt |
| | | tttttgagcgagtcaagttatgttgggactatggtctgggatacggacatcataaagatatagctctgaatcaggtgctgactgcaataaaaactattgcaactgttgagcctaaa |
| | | tatgcattaacgcagcttgagcgtgtgagtccattggttcataatatttgtgacttcacagatggtgaccatactcaacattccgtaacggaattgtctgcgctatatgctcatctttc |
| | | tccccttactttaagtagtatctatgacagttatgttagcgagggtgagtggtatgatgcggataatgcattaacgcaatacttaaaacatgctgatctatcatcacctttcgttgag |
| | | agtttatgccggacattactagatgatgggcaaattgaaataatacagaatcgtgctaaagacaatgccatattgactacgttttggccggaaatattaccacgaaaaatggatt |
| | | atagtagtagcgcaaaacgttcattaagggggactgaaaaatttgatccagcaaaaatcagccctgctgatgtaactaatttactcaatgttcggtcaagttatgaaaatattcct |
| | | aagtggtatcattattggaaagaccaaggaaaagttacagaagtaattaacgtattgctgccaatcattaataatggcttgccagaatatagtgaatttcgttatatattatctgattt |
| | | atttgaagatacattgcgtttgaaaggtaaaaaatatgcttttcccattttagtgcaggaacatattcagcgaaatggttggggtgaatggggggagtctgatgatcaaacatatg |
| | | ctcggttagataaagttatcagattgtatccggataaaattgatgactttctttacaagacgactcgacttcatcactataaaactaaagaagagaacttggtaattcccgggaata |
| | | agctaacatatttattagtaaatgtaggccgagtggatgaggcgaaaagtctatgtgaagcgatgatttcggaggtagaggcagaaacccagaatcttccgttgtgcaaacct |
| | | caatggcaatgggagggagaattagataacgatatgatcgccgttaaattcatcattcgtcgtcttttttggcctgttcaatgtgtaaaacatcttgtcgctgatcaattgtctcatct |
| | | cttagttaatggtcaatgtgctgaagaaattgaaaatttacttgtagttgagatgggaaatcgtcaactggagtcagaggtggtagatattttaactgttctctggttagctagtttg |
| | | aaaggttataaggttcagaataatatatcttcctttatttatgctcgtagctttctttcagatgcattgctggaggctatcgttccaaatttaccaaacctcagtcgctatcaagtgctg |
| | | tataaacatcctgatgatgatggtaatcactatggctttgaaaaaacacttggcaatgaacttccccatatattttgggatgaagtaaaaaggcttgaggagaaatctggagctc |
| | | cggctaaaatattaatgaaaaaagaatggaatgatatttgttataatcatgttcaacgatgggaaagggttgattatttcttcggttcagagcgtgatggttttactatgagtttttcc |
| | | acaaggaatacacgatttggtatatctgcatacttgagaaccattaaccggcttatcaacgaatttagaatgccaaagcattatgcagaacattattcgatttgtttaatgtcagcc |
| | | aacccattattttattccgtatctaatcaccgacctggttggttacctttatggcaatatggggagattaccacaaaggaaaatgtaaaaacatatgttgaggaatgcctgaatgc |
| | | attcaaaaatgaacaggaaaattcaatattaggagcattgtcattacctgtacgcatcgatgaaaataattggttagatattacggctgttatggggatacaaacagaagaatatg |
| | | cctcttttaagatacaacatgccgactgtggtcatagtgtagatagtttacttcaagcttatagaaatattaaattttcatttgcaaaatgggctgaataccaaaattgtgtaccactat |
| | | tgggaagtacacgcgaattactgagaatagcacggtgggatataatgtacgaatttcgtgggcttttctcattcggttgccaggaacaggttactgcctacccggctaaaaatc |
| | | gtattaacttcgattatcagggtaaaaccatcggctatagtgacttctggcaagcaataccattatcaatttatcctaaggatatacgctcacctgttgctacttacactgcttatgat |
| | | aaggaccttgcctgtaactggaaaaatcatagcgtactgaaaaagcctaatatcatgttatgtgattgtaaggtactaaagagagaaaatagttacagtccttttgaaatatcaga |
| | | tattcgttttcactttgaatctgagccgttatagtaaggattattttgcgataattaatcaacggggagctggtcaaagtgcctgctcccatattgactaatatacaaatgtgtttgtta |
| | | agacctttccaaaggtagggggaattatgaatttccgctcctcgctcatagccgcctgccagatttaaccccaccctaccacagggccccctcaagccaagccgccgccaat |
| | | acaattttcccccacaccaaaacgcctccctccctagagcacgtactcacaacgccga (SEQ ID NO: 398) |
| 37 | ATPase_ | atggctaaagcgcactccacgccgctcaacgatattgcgattatcgctgcgaatttaaaagaccgttataaaaatggcttccctgttctgaaagaaattgtgcaaaacgcagat |
| | GHKL + | gacgcacaagcgtcatcattaatctttggctggagccctggtattgctggggcagatcaccctttattgggcgatcccgcgcttttctttatcaataatgcgccgctgacactcg |
| | Helicase_ | aagatgtagaggggatcctctccattggcattggcactaaaccgggtgatgaaaatgcggtggggaaatttgggctcggtatgaaaagcctgttccatctcggtgaagtatttt |
| | SF2 | tttaccagtcctttgactggcatactgcttcggccaaatcagacgtttttaacccctgggacagttacagatcttcttgggccgaggtgagcgagcaggataaagttcgtattga |
| | | ggatgaagtccgcgcaattacccaaaatgcgtgtgatgattatttcgttgtctgggttccgctgcgttcagagagtatctatcaggcgcgccaggatgatgaaaactttattattg |
| | | tcggcgaagactatcgttatgaggtgcctgattttatttcagacccgggactcggggataagctcgccagcctgttaccgctgatgaaaaccttgcaggacattgagctggtc |
| | | gtgaaaacagggcaggggtatcagcgtcaaatacatatctcgctgcctgaaaaggcaactcgcccacaatttaccaatcttaatggtgctggggaatggcaaggccacatta |
| | | ccgttcagcgtgctggattgccggaccctcagcaaaaattctacgtcgggcatgaggttttgctgaatgctcctgagttttctgccctgaaatcacaacgcgcctggccattca |
| | | gttattcacgagaaggtaagaagactgcggataaagcgctgcctcatgccgctgtggtgatgctggcggagaaagtaccagaaggagaggcaacgctggcggtggaatg |
| | | ggcggtgtttttacctttgggtgagcaggacaccgcgcagcatgcgcagaaacaaacattctctatttctggtcagtactcgtatcaaattattctgcacggttactttttcatcgat |
| | | gccgggcgagtgggtatccaggggctggctacactcaccagcgccacgccgttattcaatgccccagattctccaggccaggaacaactggttcaggaatggaaccgctg |
| | | tcttgctactcagggaacgttgccgctattaccgaaagcgcttgcctctcttatgtcgcttattcacgccagggatgcggaaaaagcggcaatttcggatggtgtgcgtagagc |
| | | tttacgcaacaataatgcctggttccactgggtaacgttgtaccatctgtgggtatgcgaactaacgcgggatggaagtcagtggtgtttagttgatgcgaacactcccgttcgt |
| | | cgattgcctgccacaccttcaggtgaagcgcatcgcccctgggaagtgctgcccgctctggaaagtctgggtgtaacgcaccgatttatcgatgaaacgcagcagaatatct |
| | | acaacgaatttaaaagtaagtggcagttgtcggagattcaggtgttgctgcatagcgtacccgaaatggtgttcactagcttaaagcttacaaattatctcaatcaattgctgaaa |
| | | gaactgccgattcagtcagacagctttgtgcttgacctgattgcattgctcagaaaaacgttatttagcgtgccgctggttgagctctcacgtaaccaggcggcgatcggagaa |
| | | ttgatggcgttcattcgtccgacctggcgttacaggattgccattgaccgtcaggagcaggccctgtgggaaacgcttgggcgtaccgctatggataggttgttggttcctgct |
| | | tttctcgataacagtaaagaacctgccagcgcatctctgaattgggagacggttggcagcctgctgcaagcgatgcagaaacaggcttctgccagcgataactttgaaaaatt |
| | | ggtgcgggattttattggcaagctctcatctcccgatcgtcaggagctataccgtcggtttgataccttgaaggtctttaaggtttcacagccaacggggatatcttacctggag |
| | | acgcgctgtcacttgcttgaactaaaacaaaagcgaaggatattcaaacttggcgggagcgctaattttggtatgggtttaagcgcattgttgcagcaggcattgcttgaaaaa |
| | | gaaatcgtattgatcaccaatgatattaaccagaccttatttggtggttctgaatattcagaagcaaaggagtgtgacagcgaaggggttatccatctgcttgagcttcaccctcg |
| | | tctggattcgccgacaaaacgtatcgatttactcaataaaatggctgcggacggggacaaatttagcgccggagatcggcttgtctatcgctatctgatgcacggtaattcgga |
| | | tgatactggtgaagctgaattgtggaaggcgggtaaagcgcatcccgtatgggcaaaaattctttctgatgccgattcggagcaggtcaagtggactattatttcgccagaaat |
| | | tgagcagaatcttggactgactcccggattcgagaaggcgcttaggcttgatagtgtaacgccggatcatgtgatccaccgcttcaaagaaagccttgaatatctggagtttga |
| | | tgacttatctgcagaagatgcggaagaagttctgatgcacattggccgctctatgggcgaaacaatgtggcggcagatggctcttcatcgtagggaaggcaaagaggggta |
| | | tatatcccttgatgatcgttgtttcttgcgtggggggcgcattgaactgcccactgaattgaatgacaacgtgacgttcatccaacccgccagtcagccagagatgcaggatca |
| | | gcagcgcaaatatctgacaatggtgaacgccgaacatgcggtcatgctggctttatccgggccgaacccggaacgttactgcgactttatcctgcaattgttaatgcaaccga |
| | | cgaatgatttgtcttcagagagagcattcaataacctgcgccgccaaaaatggctattgcaccgcggtgtggcgatggcaccagaaaatattctggatattagcgcggcaga |
| | | ctatccggagatcgcgaagctgacagaagcgacgccgctcatcgctctgcttgaggatattgctctcccagatgaggctaactgtgcgctgagttcattggtcgtgcgaggc |
| | | aaggctgcgttttacaaggcgctcactgtagcaggtacacttccactttatgcaatcggtagcagcttacgtctcactgatacgattattcttcaggccagtgacaggtcgtacg |
| | | cgtttgagagctttgacggttggttgctcttaattgagtgtctcaaaggtgctgagtcgcttgagggtaatgaggctatcaatgcgctgagtttttcgcatccggttacagacaag |
| | | atagttgctagctaccggcatctcgttgacagcatgaatccaacccaaagtggtgaattgcgtaaagcactgttaagcacgctgtgtcatacccattcagatcccgccagcgta |
| | | ctgcgttcaatcccgctcagaacggctgctgatacctgggcgttagccaccaatctctgttatggcgtaacgggagcagaacgtagtgctgtcctacatgacgacgactggg |
| | | cgtatttgtccccttggctgcaggctaatgacttgtcggtagacagtactgagtccgaagggcatctcagtcatgttgagcattctgccaatgtcttaagggaatactttgcgccc |
| | | tgggaacgctgggttccacgtaaggcaattgctgcactgctggctttgctggcggggaatcgtaaggttcataagctatgtgagagctacctggggttgcaaagttatgccct |
| | | gttcgtgaatgaactgtcgcaagacagcaaacccttaactaaccatgacgctcactttgcagagttaacgctcttacagtgcattgagaaatatgcctttgccgtgaaggtttac |
| | | gaagaaaacacgttgcaggttcattctctgttccaggaacgtttgaccgtggcgctggcaactgacctggatacgatctttgtgggtcagcacggctacgctttttataccggtc |
| | | aggcaccgcaaatcttcattcgccgattttccccagaccagtatacgcctcagcaacttttggcgattctgaaacgcagcaccagctggctgcaggaaggtatttatctgcaga |
| | | aggcaaggctagacacgctctggcaatcctttgagcaggccgagcagttggatgtgaatatcgcgcgcgtcactatcctgaacagcattgttgagcgcctgaaaacactgg |
| | | gccttaaaaactctcagcttaacgttttaatgagagcctatgagagtgagcttcactctcttgctgaaagtagtgacggcaagttgctccacagctcgaggctcactgaaattgt |
| | | ctatgacattgcaaatgctatccaggatcgccctgaactgcaggctgaaatattaacggcggtcagaaagcgtatagaggatgctcagtatcagccatcaagcgttccttttga |
| | | gctgttccagaatgccgatgatgcagtagaagagttgttcaagctggatagcgatgcccgtcatgagcgggtacaccagaaatttatggtgaaagagcaaaacggcggatt |
| | | gtcattcttcaactgggggagagaaattaaccgctttcagagcgtgaaaaatgagcaagtcgagaatgtacatgatggctacaaaaacgatctgaaaaaaatgctggcgcttt |
| | | accagtcggataaagagcagggcgttaccggcaagttcggtctcggcttcaaaagctgtctgctggtgtctgatcatccttacctattgtcggggcggctggcgactaaaata |
| | | gcgggtggaattgtgcccgaatcctgtgatgctgaaagttataaacaactaaaccaactcactgaaagtgccgcgacaaatggcctgtcacctactcttgtgtatttgccactg |
| | | cgccagcatatgcaagcggaagtggtgttaaaagattttactctgtatgcaggtttgctaagtctttatgcacgtaacttgtgccagattgtcattgatgagcatgaatggcgctg |
| | | ggagcctgttcagtatgcacgtattcctggtctgtcattgggcaaggttatgctgcctaacggcaagggtgctcagtcgccagtgcgggtggtggtttaccagactgaaatcg |
| | | atgatgagcgctgccatctggttttccaggtcacgcgtaggggcctgagaagttttgatactcatattccgcgattgtggaacttgtcgccattgatgagtgatacccggcagg |
| | | gctttttgattaacgctggatttgaggttgatattggtcgacgccagttggctattgaagctgaccgtaatcggggcattatccagaaagcgggagcaaaagttcattcgctgct |
| | | ggaattactttggtgggaaacggagcataactgggaggagctggttgttgagtgggaactgagccctgaattgacccatactcagttctgggaaagcttctgggacgtgatgt |
| | | ctacaggcattagtaacgatattaacgcgatggaaaacgaaaaattgctacagcagctttacgaaagcgaaaatggcatcatgagcttctatcgctcatatcccgcgctgcct |
| | | aacggatttaaagagcaggctgccggactgataacgtggagcgacagagtgcgtagcgcggatgaactggtttctcgtctggcgagttcactgattcatctccctgcgtttca |
| | | ggcattgcacagtgcacagtgcctggtggcagacacgacgggaagcaaacttaaagtcgaaagtaaactgtcgcttgaatcattaataagctcgtcgttgccggataaaca |
| | | gggtgttgatatccagcatctgtcaccgcgggatgctgaaaagctggcagtcgtatttaacgaagagttcgacaagcgactgggtgaactgacaggctggcaggacaaaat |
| | | tgaggctttcagaaaacagctgataaacctgcatgtgcaaacacaagcaggctctacacgcccgattagccaaattttgctcggtaacactccttgtgccgaaaaaaatgaac |
| | | ggatgatctctgggtttgcacctaccgatgccatcatttcatcatcatattctaagcaggcctgtgaatttattgtttattgcaaacgcagaagtcagggatatgtttttgaggattta |
| | | gtcaaatgggcaaagcgcaaaggcctggcggctgataatcaaaagcggcaggcattttgtcgttttctgattgaaggactggaaggggagaaactggcgggtatgctgatg |
| | | gaagagataccaccggactggttgcttgaacttaagctgcgcccaggcgccttcccggcagactggcactggagcaataatgatattgcctctctcctgcaggggcggttac |
| | | tgactaacattgacagaacaaaggcatgggagcgcgagattcgggagacaccggaagaatacgaaccgttggtgacaccaggtgaagccgtacaaaaaatacacacct |
| | | ggtgggagaggaaccagcaggaagagttggtgaaatacaatgctcggctctaccctgaaggctggtttgactgggaagctttaagaaatgcctctgacgatcagcgttcac |
| | | gcctggcgttattgaaactcctgtatctaggctcatgccagaccattgggcggactcaggaagagcaacacagtgccgcaattgagtattttgaggacaaaggctggtggga |
| | | aacctttatcaaccctgatgcagcgcagcaatggctggatgtgatggacaattatctggaggattctttgtacggagatacctaccgtatctggctgcaaatattgcctctgtatc |
| | | gtttttcaaagcatttagattcctatcgcaaactactggatatgtcggaagcgttccttgaggatattggggatttgctgcgaccggcatccagtttcaatctttcgggaacgggc |
| | | gtgggaactgtagtcccggagttacgtgcaactctgggtactggggtgaacttcatcttccgtgaattggtgcgtaataacgtatttatcgattccagcattcatcgatattgtttct |
| | | ctgcgccggaacgcgtcaggcgtctgttactggcgatggagttcgacgaaatggatgttaagcaatccactgccagtgactcgcttctgctgtggacgtttttccgcgaacat |
| | | ctcggtgaggaagatgcgacctttaatcattgtttcgacataccgctgcgcattttaaccagcgaagggaaacgctcacttcgtattgagatatttggacaggatcccctggatt |
| | | acgtatgaaaatgatctttcagcagggccagcaggtacgacatgaacgctttgggctggggacgattgaactcttgcgggaaaacactgcactcattcgtttcgagtcgagtt |
| | | ttgaagaacgtccactttccgaactggagccggtgcgcagtgctcaggatgctttggcagaaggaaattatgacgatctgcgtgaagttctggcgcgcagtcaggcgcttgc |
| | | gatccgctccatcaatgatagttggggggtgttctctacttcacgtatcaacctgctgccgcatcagttatgggtatgtcaccgcgtgttacggcaatggccggtacaaaagct |
| | | gattgctgatgacgtagggttggggaaaaccgttgaggcggggctaatcctttggccgctgctggctaaaaagcgtgtgcagcgtctgttggttttagcgcctgcatcgttagt |
| | | accgcagtggcaggagcgtttgcggcagatgtttgatattcgtttgtccctctactccgcggaaattgatactgagcgatcagattactggaatacgcatccctgggtggtcgc |
| | | ttcattgccgacactgcgaaaagatattaatggcaggcacgagcgaatgctcaaagcagacgactgggacttgctgatcatcgatgaagcacatcaccttaactcgctagaa |
| | | gattcgggggcgactcagggctatcgatttgtgcagaagcttatcgatcacggaaagttcgcctcacggctttttttcacagctaccccccatcgcgggaaaaattacggcttc |
| | | tttgctctgttgaggcttttacgtccagacttatttgacgtgaataagccatttgaaactcagcagcatcatgttcgggatgttgtgattcgcaataataagcaaaccgtcacgaat |
| | | atggacggtgagcgtttgttcaagaccgtcaacgtgacctcacagacctatcatttttctgaggctgaacagtcattctatgaccggctcacacgatttattctttcagggcaggc |
| | | ctacgcttcgtcgctaagctctgcaaaccagcaggccgtgcaactggtgttaacggcaatacagaaactggcggcaagttcggtagcggcaatttatgccgcaataaatgg |
| | | gcgtatcgccaggctcggggaaaatcagaaaaagctgcaggcgctgaatgatgaaatgaatgccatcatgagtgattctcaggccccggatctcgatgatgcctacattgc |
| | | gcttgaaagcgaatatgttgaaatgtctgcttcggttcaacttatgcaaaatgagctgcccatgcttgaagagctgcaggcgcttgcggggaatgtggaatcggaaacgaaaa |
| | | tccagaccttgcttcatgtgctggaaaacacgtttcttaatcgcaccgtcgtattctttactgaatataaagcgacacaggccctgctaattaatactctgaatgctcgctttggcta |
| | | tggttgcgtcagctttatcaatggcgaaggacgcctggaagggatttacaataaacagggcgtcaaaacgtcatggagtatggatcgctaccatgctgcggagcaatttaaa |
| | | agcgggcaggtacgctttattgtttgtactgaagccggtggtgaaggtattgatttgcaggacaactgttattccatgattcatgttgatctgccgtggaatccgatgcgtcttcac |
| | | cagcgtgtagggcgactcaaccgctatggtcaaaaaaatcaggttgaagttattactttacgcaaccccgatactgtagagtccagaatatgggacttgttaaacagcaaaata |
| | | accacagtcatgcgttctttgggcgacgcgatggaggaaccggaagatctgttgcagcttattcttgggatgagtgataaagtttttttcaattcactttttgctgatggcctgaca |
| | | caaaagccagaaactctaaatacgtggttcgattctagagcagggaccttcggtggtcagtcagccgtcagcgtggttaaaggtcttgtaggccatgcggataagttcgagta |
| | | tcagaacttagatgaggttccgaagcttgatcttatccatatgtatggtttcctcgagaacatgctgaaattgaatggacaccgtctggacaatgataagggtgttcttagctttgt |
| | | cactcccaaagactggatcacacagtttggtatcaagaagaaatataacaatatgacttttgaacgtgttcctacagagaaatcgttagaagtgcttgggatagggcatgtgatt |
| | | attaataatgctattaatcaggctgagaaatttaacgcctctacggcagtagcaaggggtatttcctcagctttactgatttacacattgagagaccagattactggcgatagtaat |
| | | gtacaatcattttcagttgttggagtggtactggaagataatattcaaattttggtcaacgctgagttagtcaataaactggcttttatatatgacaacctacctaaaggttcgacgg |
| | | tgattaagcttgacagtgcattccatgttaattttgagagggatataaagcgtgctgaggccgcattagatctctttattcctgggttgaatttaccctatgagcaagtagtatggca |
| | | acatacagcaacttttttgccacagtaa (SEQ ID NO: 399) |
| 37 | ATPase_ | atggcgggtgcttcaatagacgctattggtgtgattaaccaaatcaaagacaacttaacagaccgatacgaggatggctttcctgtccttaaagagatcattcaaaatgctgac |
| | GHKL + | gatgcgggtgcgaacgaattaactattggttggagtaaaggtttctgcaatgcagaaaatgaactactcaatgcgccagcgctgttttttatcaatgatgcaccactggcagag |
| | Helicase_ | gaacaccgtgatgccattttatcgatagcgcagagctcgaaagctacatctaaggcatcagttggaaagtttggtttgggaatgaaaagtttgtttcatatgggtgaggcattctt |
| | SF2 | ctttatgtccgatcaatggcgaattgagcattgggcgtcagatgttttcaatccatgggataagtatcgtgatgcatggaatgaattcggtgaaaatgacaaatgccagatcgca |
| | | acaaagttaaaagggtttttaagtaccgataagccttggtttgttgtttgggtcccgttgcgtacaaaagcgctagctaaagcacacaataactacattatcatcaacaactttagt |
| | | ggtgatgaaaaactccctagtttctttaatcaggctcacttatcagagaaaacttctgagattttgcctcaactcaagaatctcaaagacatcggctttttctgcgagtctgacaag |
| | | ggtgtgtttgatgaagtgacctccatacagttacatgaagattcgtctcgaagctctttttgcggtgaaccgcgattaaataatggagactcttttgcagtcttctcagggaaaatc |
| | | tattcaaattcgaatgaagagcgttgtgcactggactatgcaggatgcgagcgagtcatctttgatgagcgtttaaatcaattaaaagacgaaaatatggggtggcctaagagt |
| | | tatcagttcgacaagaaagcgaacttgcctgttgaggctctcgacaaagctgaacagcatgcttctgtaacattttcgcgttttaaaacaaaggggcaagcgtacctcaaagcc |
| | | aactgggctgttttccttcccttaagccaaaccaaggaacttgttgctgtgcctatcgagggggagtacgactacaatctctatttacacggctacttctttgttgatgctgggcgt |
| | | aaggggttgcatggccacgacaatcttgggttttctacctccctagagcatgtaaaaaatgatgagaaaaagctgcgtgaggtttggaacatcattctagccagtgaggggac |
| | | attcaacctcgttttaccggctctaaatgagttttgtcagaagttaaggctgccacatcaaataaaaactgttttgaccaaggctttgtacgatctcctcatagaaagatatagaaa |
| | | agaagtatccaagagcgccaattggataatcaatatcgatgacaagggggctgcttggtctttacttgataagaatgcccaatgcttaccgatccctcgtccagagaatagtga |
| | | ttactctcgaatttggtcaacgttgcctggtttgagtaagttactggataaaaagtcactgtatgaagccacgggtaatgaatttttaaccgagcagaatcaacgtgatagttgga |
| | | atattacgctcctggaagaagcgttaggaagtggtgttgtcaacgcattttacagatcaatcaatattgaatatctgcttcagttccttcaactagctaaggagcagtgcacgacg |
| | | gaagattttgataacctgattattccacagttccgagaggtattgtctactcataagcttgctgaactttcattgaacaaggctcttaacacgcaagtttttgagcttgttagcgcac |
| | | ctaaaaccgtcgtactaccaattgataaagatgatcaatctatttgggaacttgtctgcaagatcattcctgcaaagctactgctccctaaatttctgtctactcacaataagccaat |
| | | tcatgacaatgtcactgaagaagagctcttcgcacttttaaccctagtagatagctacatcaaaaaacagggtgaacgtttatcctctgatgaatcgtctgcctgtgagcgtctca |
| | | ttacatttgttattgattgtgtaaatgcaagtgaggtaatccaaaaaagcgatttttatcagaagagtgggcatttaaagcttctaaaagtggaagctcttggttcgcaacagagca |
| | | caaaatatcgctccttaaacgaactcatagtgttaaaagaaaaataccagctgtttcttcgtggaggggagcggaactttggtaaagggttggggaaagagctagttgcagtc |
| | | gtgcctggcttggagctttgttttataagcaaggattttgaaattggtggcctatatgaagggcttaccgcttgttctgaagccgcgtgcctacgactgctttccacgtacccaaat |
| | | cttggttcaaattcggcaagactagcgctcactaaagtattctctgccgagctctctacagatgaggagaaaagaggtttccggtatttgattcacggcagcaaagaagacga |
| | | cttgagacaaacgctttggaagccaaacagggcaactaacccagtatggatgaaaatttggcgtatgtgtcagccagaagatttccctggatggtgtgagttagatgaagagt |
| | | tttctaatgctttgacaaaccagtacgaacattttattggcgttaaagagcagttctataaagacattatctctgaatacagaacaatactgcctgaatgcaattttgataactttgat |
| | | gactgggaagtggagcaactgctcgcagatattggtagtcaaggagatgaaaggctatggaaagcgttgcctgtccataggacagctcataacactagagtcgcgattacg |
| | | accaaatgcctgatggaaggaagtgcaacagttccaagtgaatgggatgttcaccttattcaacattcagccattgctgaagtcgccgcttgccagcataaatgggtgaatcat |
| | | ggtctacctaaagagctgatcgagattgcgcttacccaatcaagtccagctcagtattccgcatttattttggaccagctctgcgctattcgtattgcgaatgaaggaattgagca |
| | | tgagttggaaggcaagataaataataccaagtggctgcgattagcgtcaggaaccgaggtttcaccggaagctattttatctttctctgccaatgagctgcctgagtctgcaaa |
| | | gttctgcgagttaaaagagtcaaacatttacatgttctctcaactcgatggaaacatgtttgagcacgatcaagcacgtggtttcttgagagagtgggtcgcaaaaagtaacag |
| | | ctcagtttgctcgtgcattttggcagaagccgcgcaacatcaaagttatgtagttggtaatttttccaacatttctgctcaggtgctagaacagatttcatgcatcccgccattgatg |
| | | cagctatctgcaggctggggcttactggttgagctctaccaaagccaatatctttcagtgaatgaaaacaagcaagtgatgctatgtaaggaaacagaaccacaatcattatg |
| | | gtgggcgctggagcgtattgctgatgatgatattcacggtcagtcaaaggaacttcggaaagcatttttagaagcgttgtgtaacaccgagggaggcgttgattatcttcctaa |
| | | actgagatttcgcaatgagaacggaagttatgtatcgggcaacacactggtatcgaatgttgctcaggtagttgctgataacttaatttcgccacaagaatacgcagtcattgag |
| | | agttattgcagtaaatctgctctcacgaatggtaatacgtcaaaaatcattgagttagcgggcgataatgcgccagtacttagtgattacttcgatgactgggaagggatggttc |
| | | cccctgatgccatagcgacatttatagcactgtttgctaaatctggtggcgtcgagaaattggttaacaattatctaagacagtcaacgctggagtcgataaagcaggggtatg |
| | | aggaaaagtggaactccggaaagggacgtagaggcgaattttcacactatccgtatagctcgttatataaaagtgttgattttgaactggcaatttgtgcagaaaatgcggcgt |
| | | acatgacgtcgattttcggcgaaagaattcaagttaaattacaaaaaacaccagattcattgcttgttcaccaagcgaacaagtccaagacgaaaaggatagagcttcgccga |
| | | gttgatacaaagaatgtatcaaaagaccaacttctccgcatgcttgccaaagctgtagaaacgatttttactgatgtgtttggtgcagagtgtattcgatttgaaagtgaatttttga |
| | | agaggtttggtgcttcagaacaggtagatattcagattacccgacagatagtcttggagaatgttgtccccctacttgaaaggcttcaagtgcgagaagaaggactttgtgattt |
| | | acgttcagattacaaacgtgaacagcgtgttttggcgagcagtgatccttctgtactacaagatcgctcacgccttaacagcgtccttacgaagattaaagagactcttgaaaat |
| | | aacgaaaaagtgcaatctttggtactcgaatctgtacgaaaagagatgagtaaacatttccaatactcgcctttcagcgtgccatttgagctgtttcaaaatgccgatgatgcttt |
| | | gtgtgaacttattgaaatgcagggcgactcaaccaatgtactgactcgatttgatgtggtttctggcagtgatgggactcttaacttctaccattgggggagagaggttaactact |
| | | gtaaaagttcatatgtcgcaggcaaaaaccaatttgaccgcgacttagaaaagatggtgagtctcaacgtttcggataagtcagatggaaaaacaggcaagtttggactggg |
| | | ctttaaaagttcattgcttcttaccgacattccacgtttggtgagtggtgatatttgtgcagaaattcatgctggcgtattaccgagtgttcctagcaaaccagtgatgacggaactt |
| | | aatcaaaatgtcgatgagtataaaattggaaatcgtaaaccgacattaatccagttgcctaaatgtgataagaagcgggcagatttgaagttggttttgggacgtttcaaaagta |
| | | acgctggcattctcacggttttttcacgacaaattcgagaaatcaatattgatgagcagcgatttgggtggtcgggacaggctctccataatatccctgaagtacttgtcggtga |
| | | agtgaaactgccaacaaatacttctgaagagtctaacgttatccttcgaagtaatagagtgcttattatcaataccgagtccggtcagttcctttttgctttggattctaacggagtt |
| | | gtttctctttcgaatcgaaaaaacctaagtagcttttgggtgttaaacccgattgacgaagatctgaaattgggtttctgcatcaacgcgccatttgcggttgatattggtcgctctc |
| | | agcttgctgtagataacggagacaatatcgatctttccagttcactcggcaaagcgttatcagctgtgttggtcaaaatgtttgcagcttcttcgaataattggaatgaatttgctg |
| | | aagaggttggcctgggacaaagcagcacatttatcaagttttgggcgtcactttgggatgtaataacagcccattggccagcaaggcttggagagacgaactctaaagctga |
| | | actgattaaacaaatgttcacagtggaagatggtctgcttgcgttttaccagagatgtgcggctcttcctcgaaatcttggtgtaaaggaagattctcttgttcaacttaaaaacgtt |
| | | gatactggagcgaataaacctttgaccaaggcatttaataccttgggaaatcacccgatacttcaacggctatataaagaccaacaactcgtcgggcatgacacctttgagtttt |
| | | tgaagagtatcgattttagaccgaataatggtgcgttaactaagctcgaattgatcgatttgattggacaggactttcctcacaatgaagtaaaccacgacagagcaagtttctat |
| | | ggtcgcctatttggtaaaaactttgaaaagttaatgtcgaattttgaaatgacagtgactgagaaaaaggtgttggaagagcgtttttctgaattgaagtttctcaacaaaaccggt |
| | | gtatacgtgactgcaagcaaactgattgttgaggggagccctgagagagacttgctatccaagtttgcaccagacagcgcgaagttaagtgaaaaatatgaccaagcatcaa |
| | | tggacttggttagcttcattcgtcgtgacgtaagctatgacattcattcatgggctaagcaaataagatctgaagaatctaacaggggaggaaagcaggaagggttgtgtagct |
| | | tccttgttgaaggcggctatttagcatcatcgcttctcagaaaactacagacggatcaccccgcgtttcttacaaagggacgttttgatccgagcgtattaacagaaaaatggcg |
| | | ttggagttcttcaaaggcttcggctttcattagcatttggattgatacagaggaagataaagcaaggcacgtacgacaagcgcaaaaagagtttattccgaatgtgaccaatgg |
| | | tgagcagatcctcgaaaacatcacgaactggtggaatcaatgtcgtaatcaaagcttaattgattatgacaaacagctctatgctcaaccaatgccttggaaggcaatgacag |
| | | aggacttcgagcttgaaacgttagaggttcgtaaaggttggttgaagttgttctatttagggagttgccaaacattaggtttcaataacgatgtagctaatcggaatgttgtttcttg |
| | | gttcgaggacaaggggtggtgggataaactagccgttgccaatggtcctagccctgaagtatggaaagaattaatggaagaatatcttcaaacagcacgcgttgatgagcgt |
| | | tatagagtttggattcaagttcttcctttgtatcgctttgctactaagctcaaggactatgtcgctctcttcatgaacgcttcctttattgataatcttgatgatttgttaaaaccaaatag |
| | | ttcaaacaagttatcaggctctggcatccaagtatctgagttaaaaggaacgctcggtattgggattaatttcattttacgagagttgcaaaggcaccaagttttggagcgtgagt |
| | | attgtgaagatatccaaaagtacgcatttgttttgcctgctcgattacgaaagttactcaaaaaaatgggagcaggtttaagctttgacgcagagccagagaattcagagcgag |
| | | cttacgactatttcgtttcggcattaaatagtgaaacccaccctcttcttaaggactttgacatcccatttagagtcttgttggctgataagcaagcgtttgaacgttgttttaattttgc |
| | | tctagatgagcagtttgaggaagtatatggataacattatacgcgttattcacccaaaattcggtgtcggtaccgtcgaattcgaaaaagctgagacatctcttgtccgatttgaa |
| | | catggttttgaggagtgtttgaaaagtgagcttgaggcggtcgctgatcttaagtccgatcttgtttctggacagagtgtcgctgcctctgaacttgcgttaaaaacattagcgca |
| | | ctcactaaaaagtgttaatgaaaattggagtgttttttctaaatcgaacattaatttacttcctcatcagttatgggtatgccatcgagttctaaggcaatggccaacaaatcaactg |
| | | attgctgatgatgttggtttaggtaaaacgatagaggcgggcttgattttatggccccttatcgagaggaaaagagtcaagcgtcttctgattttgacgccagcacctttggttga |
| | | gcagtggcaccaaagaatgcttgatatgtttgatattcgtttgagtatgtatgcaccagaaaatgatacctcgcgcgtcaattactgggactcaaacaatatggttgtcgcttctct |
| | | acctacgctaaggaacgacaagaatgggcgtttagagcggatgttaaatgctgagccgtgggatatgctcattgttgatgaggcgcaccatctaaattcaacggaagataag |
| | | ggtggaacgttaggctttcgctttatacagacgttgattgaaaatgataagtttgaatcgaagttattttttacagcgacgccgcatcgaggaaaagaacacggattcttctcctta |
| | | ttgcagttgctgagaccggatttgttcaacgttaagcaaatggatgagcgagaaatgcgcccatttgtgaaagatgtgttgattcgaaacaataaacaatttgttacggatatga |
| | | atggtgagaggttatttaaacctctgtctgtgtcctcaagaacttacagttacagtgaacaagagcaacatttctatgacctcttaaccaagtttattgtatcgggtcaagcgtatg |
| | | catcctctttgaattcaagggatcaaagagcggttatgttggttcttaccgcaatgcagaagctcgcttctagttcaattgcagctatcgagagagctctaaaaggacggataga |
| | | gaaacataaactaggtaagcaacgtcttcaggatattgaagttcaacaggctgctttattagaaaagcgtgaggagtcagaatcgcagtctgaaagcgagatatacagtgatg |
| | | aattagcgcaattagaactggaatttattgaaacgacaacgcgggttcaattgatggatgatgagctccctagaattatggagttgttgtctgcttgtcagaaagttggctctgaa |
| | | acaagaattttaacaatattagatatcctagaaacggagttcaaagatagaactgtcgtcttttttactgagtataaagctacgcaagcgctattaatgggtgctttgaataaaaag |
| | | tatggtgaaggctgcgttacttttattaatggtgaaaatcgtcttctgaatgtagagaatggctcaggagtatgtgttgattatgtcaccgatagatacaatgccgcgaagcgtttt |
| | | aatgaaggcaaagtacgatttataatttctacagaggctggtggtgaagggattgatttacaacaaaattgtttttcaatgattcatgtcgacttgccttggaacccgatgcgactt |
| | | catcaacgtgtggggaggttgaatcgatatgggcaagtcaaaaacgtagaagtaatcactcttcgaaatcctgataccgtcgagtcaagaatctgggatttgctgaatacgaa |
| | | gatcgatttaatcatgcgttcggttggcggtgcgatggatgagccagaaaacctaatggagttgatattaggtatggcggatagcacattgtttaatgagttgtttacagaagca |
| | | gccaatcgtaaaaactctgaatctctctctgcttggtttgaccataaaacaaaaacattcggtggcgagtctgtagtgcaaaaagtgaaagacttgattggtagagcagaaaaa |
| | | tttgactatcaagatcttgaggctgtaccgcgtttagatcttggagatttaaaaccgttttttactcagatgctttcatttaatcaaagacgttgtaagtatgatgaaaatggtggtttat |
| | | cgtttttgacacctcacgcatggttggggcaatttggaaccagacgctcgtatgagaaattgcattttgaccgcaaagctaaacagcttgattcagaagctgacatcataggctt |
| | | tgggcatcccatgttttcaaaagcggttaatcaaggagagcaaatccctggaagttacgcgtttcttaacggtatagagaaagatcttgtagtgtttaaggttcaagatcaggtta |
| | | cgggaaccgatgcatcagtaaaagtgagtattgttggactggtgctcgatgataatggcgattgtgaattggtcaaggacgaagaccttatcgggtatttaaacgagtatctta |
| | | aaatttccaatgatgttgactctaaacgtacaccagaggatttagtgtctgttattcaaactgctaatgattatctaatggagaatgtgtcatcaattggcttaccatttaggctgcct |
| | | aattctgaaccattaacggtattctacaaagcaagtaactaa (SEQ ID NO: 400) |
| 38 | ATPase_ | gtcatagtcccttacggagataattcattgaaattaatatcttatacagcacatgtaaatagccgtggtgtatttttatccaatgaatcgttacaaaaataagatgcatgcccaccct |
| | GHKL- | gttctgtgtgaacgctacgaccagctacggatttataccaaaagtaggaattctatatgtcacgtattaccatcaacgttttatggttaaccgtaccaatagcgcggaagtgggc |
| | DUF3684- | atgagcgaagtagcagatcaacagcaattggaaactcagccagcgggtgatgacctcctgcaaggtgtcaaacgcgttctcaggcatgccgttcaggcgtacggggatgg |
| | DUF3883 | gttaaaggtttatcaaagcctgcaaaatctcaacgaggtgattggcacggagtacggtaatcgggtcatttatgagttgattcaaaatgcgcatgatgcgcatacgtccgaaga |
| | | acgtgggcggatagctgtcagcctggtgcttgaaaacctttcacggggaacgctctacatcgctaatgatgggcgagggtttcgccatcaggatgttgaagcggtcaaaaac |
| | | ctggcgatcagctccaaagagattggcgaaggtattggcaataaggggcttggatttcgcagtatcgaggcgctgacgcaatccgtgaggatctattctcgctcaaatacga |
| | | acggcaaggaccgatttgagggttactgtttccgtttcgcagatactgacgaaatcgcgcataatattcgcgatctcggtgttgatgacgcgatcagcaacgaagttgccaaa |
| | | acgcttccccgctatcttgtgcctgttcctctagatgatcaaccggaggatgtccgcacttttgcccgcaacggtttctccaccgttatcgtggcaccgttagaaactgaagcgg |
| | | cagttacgcttgccagaacgcaggtgaaggagctgaccaatcgcgatgttccactgatgcttttcctcgatcgtattaccgaaatcagtatcgaaattttatccccggatgagaa |
| | | agccgaaaagcgcaccatgcaacggcaggaaaaggcgctgggaagtattcctgacgcgcctgatgtcagtctctacgaagtcgatataggtcagcggaaacgctttttagt |
| | | ggccagaagcaatgtcgataaagcgcgcgtgcagcaagcggtgagcgatagcttattgactgcacctcagctaaagcgttggctgaactggcaagggataccggttgtttc |
| | | tgtcgccgttggcctgaacaaatcaacagtaacttctggaagactctacaactttttgccaatgggcactgaggccgcttcaccgatttgcggctatatcgatgcaccatttttta |
| | | ccgatattgacaggcgtaacacgaacatgagtttgcagctgaaccggctgttaatggaagtggctgcggaaacctgtgccgctgctgctttgtccgtcgtatcccgtgagctg |
| | | gatataggtgcatctgcggtttttgatctgtttgcctggacgggggaacatcgtcgcatgatgcaaacagcactggaacggaaagatacttcgctcagcaaagcccgcctgat |
| | | tccggtgatggctccgccaggaaaacagcaatggtcgagtcttgaagaagtcagtatctggccggaggtgaaatttgccatcctgaagccgaaagacgttgccagatacag |
| | | tggcgcgcagttggtttctagcgaattgaatacgccgcgcatagtgcgtttgagggagataacaaaatttccctatatgtatcagtcattagatccttcggcgcagacactggtg |
| | | aaatgggcagaagcctttgccctttcgctggtggaacggaaattctcccctgccagttggaccaaattctatgatgatttggtcaccttgtttgctgcggtaaaagtgaaactca |
| | | acacacttgagaactgcctgatcctgtatgaccgccagggcaaactccggcccgcaggcgggcataacagtaatgaacacaatggcgtttttgtacgtcggcatgtatccag |
| | | aggcgacaaaaagaaagataagcgtaccgggattccgttgccgccagcgattgtttctcggcgctaccggtttctggatgaaaaaatcgtgcttagtgcggcgacgttcaat |
| | | gcgtttaccgtcgccgacctgataagagagtacgatccgatcaaagccctgtcagggctgaatacggccctgagtaataaggcgacagtcagacagcgccaggatgcact |
| | | attgtgggcatttgaggtctggcgcagcagtagtgtcgttgtcgatgtggagctgaaaaaagccgatctccatattcccgtgcagtcgggttggtgtgcggcaagcaaggcta |
| | | tgttttcatcctcctggacgccaacagggaaggttgtggaaagctatttaaccggcgcgatggggatctcgcctgactgccgtctggcagcgggtttgttattgattgagctgc |
| | | aagactggccgggcgtcgtgcaaaacagcaaaaccgactggattaaattcctccgcgtgcttggcgttgcagatggattacagccggttgaatctaaggtaagagcgcgag |
| | | catatggcgatagttggaatagctttttacgcaatggcgacgagcatgaggggtttgatagcgactggagggcagaagtaaagcgggcacatataagtttctaccatcctca |
| | | gacggtctatacctcggaaggaaaaacatggcgattgcccgggcaacttgagcacgcaacattgccagacgatctgagggagctgttgtgtacgctgattttcgcctttctga |
| | | agtcgcagactacggagttttttacctttgaggtcggtcgttttgagcgacagaattcgcaaacagactcccgtacgctgccaacgccgcttggcacttttttacgcactaaagc |
| | | ttggcttgccagcactagctcactatctgaaggattgcattttagccgtccagatgcgtgctgggcttcgcgggagcggcgcaataaacctccgcgtttcctagaccatttgatt |
| | | gagcacaacgttgatattattgaagagagtcaactagcggagcgcttgttttctgcgaaaattggcctacgtgattggaatcataccgggacggcgttggatcgcattaaaga |
| | | actggtctacattgttccgcagttgaacgctggcgataaggcggatttacagcgggaatatcaacgaagctggcgtgatatcctcgacagcgacgaagctcttcccgacgga |
| | | ttggacctgattgtttttcgccgtgggcagcatgaagtgctgcgcggcaacagcgatctgcctcctgcggtgattgtcaccagtattgcacaaaaaattgaagcacaaatgctt |
| | | gcttctgcaggctacgcaatactcggtattggcctggatgagaccgatacactcgtctcctgcctcggtgatacgggacgattttcaccccgtaagattaatgacggcggagt |
| | | gcaactttacctcgatggtaagccgttttatcccgatgagagcgatccgttgcttatctccttcgacatgaactggttaccggaaatcctggttattggtctggcgttactcgggg |
| | | aaaacttagagcggggcgttcacgccaccaaggttgataagcagctgcgcgcaatcagggtacgccgttgtaagaccctctcttttgccgtgcagggcgatgatgccaccc |
| | | caacggagtcgttcgtcagctattcctggccccatgaaacgatgccgacgctgattattgaagaggggctggtgtttaactggcagaccttagcgaagatttcccgcaacctc |
| | | tcacggctggtggataaccggttacgtttcattgaaaccttacttttgcgcctcgcagttggtcgcgataatggctcgttgagtaaaccggatgacgttaccctggcttgggaga |
| | | tgaattgcgatgttcaaacgatccgtgatcattacgcccgactgcgcacggacatcactcatgtgatagacatgctacttcctgtggtgacgtatctcaacggtattgagcttgct |
| | | caggttctcaagcgggaatatgccttatctaggtcagtatttgatgtgcgtagttggatttcatcacatctatctgatagtgatatacctgctgaaaagctgctggacgtgtgtgaa |
| | | acagcaaccgatcgggttgaactccgtaaaatgctgtcgtttgattttcagcaatttaacctggctctggaagcgttaggggaaacaccgctgtccaatgaggatgctctgcgc |
| | | agattttttacggcctttgtcgggcagaggcgttcacatattatcgatcggttacgccgacactatctggcgacctttgataccggcggagatttgtcacaatacgttcagcataa |
| | | atctttgggcttcatttccttcaactctgaatggattttgacacatgaaaccttggaaaaggagatggtggactcgcaggttgacacgcaacttttgagtgcgttaggaccggac |
| | | aatggtgaagagctgtctgcacttaatacgttattagacgcgaatcgtaaaaatgtgcgcgaatttgccatgcaggctcagccgcgagtttccgcctggtgcagacaaaatga |
| | | tgtcccggtgaatgctcactggcagtacaacgatcctcaggcgttttgccgacagctcgaaaataagggctttcttgatttccggctctttgagccggattcactaccggattac |
| | | tgcctgcgcgccgggctatggccaccaacgatgccgcccagcctagatcaggatgtgctgaatatcgacatgaggaaagtttcccaggaaaaagaacgcgctgagcagg |
| | | caaaacggcaacaggaacttgagcgtcgcagtatctttttttccgggcagtcgcttgatacagccagcccgctatttgccgatcaacttcgggaactggcgagtaccgatagt |
| | | agttggcaggtgcgcagccagcacaagacgcaggccttgatggattttggcgtggtgacaatgcgtcaggcgagcggcggaggttgcggaaaaagaaccgggcgtgc |
| | | gtatcgggagcctcgattgacacctgcacagcagcaagccatggggctggcgagcgagtggctggcttttcagtatctgcgcgatcgctttccggattatacggatgaaact |
| | | tgctgggtatctggtaatcgggcttcgttttgcgggggcgaggaaggagatgattcggccgggtatgatttcatagtgaagacgccgaaagtggaatggcttttcgaagtcaa |
| | | atccaccctcgaagatggtcaggagtttgaactgactgccaatgaacttcgtgtggcaagtgcggcggctaaagacgcaagccgacgttaccgaatcctctacgtcccttat |
| | | gtgctttcgccggatagatggtgcgttatcgaattaccaaacccgatgggcgataaaacacgcaatcacttcagcgttgtggggcatggatctttgcgtttgcgttttcagcgg |
| | | caggagaactgacagcaaccctgctcagggaaacctgagcggggtttttaaatatggcctctatggataggggacactttctgcagtaaatggataataagaaagctaacgtt |
| | | gaagtctgattctgccattttccacgacagctaaatgctggatcttctttttaggatcccaacatacctagcagtaggacgtaagtatgcttgagttcatctcgatatccttgtttctg |
| | | aatgacaggcattactatttcgtgggtgtgaaccgatgaagggggtgatgtcattggaaaataatgaggtagtagcaaggagaagttctgctcttatcatagtgaaaaagcgg |
| | | tttgggaacaaatcggaactgata (SEQ ID NO: 401) |
| 39 | TerY-P + | accttcttcgctaactgatggctaatgaggccgtaataaaacttaccttacctgtaaatacttttactactcattcagatcagaatgaagaggtttattttatttcattgaaaattaataa |
| | helicase | ataaaaatattggcacggtatgtgcttatacagaatgccattttactaacaaggaatttaccgatgtcggaattaaaaaaatttcaggtacaaacagcacgtgcattgccggtgat |
| | + HEPN + | tgtgttggcggataccagtgggagtatgtcaacagatggcaagattgatgcacttaatctggggctcagggaaatgcttgatagttttaaacaagagagccgcctgcgcgctg |
| | ATPase + | aaattcaggtcagcgttattacgtttggtggtcaccaggctgaagttagcttgccattgacgcctgctcaccagttgcaaagtattacctccctggaggcaaatggcatgactcc |
| | DUF2357 | actgggtggcgcactatcgctggcctgcgagattattgaaaatccaacgcgaaaatttcagccgattatcgtgcttatctccgatggctaccctaacgacgactgggaagccc |
| | | cttttgctcgcctgattcacggtgaacttactgccaaggcctcccgttttgccatggctatcggtgcagatgccgatgaatcaatgctcaacgaatttgcaaatgatcctgaggct |
| | | cctctcttccacgcagaaaacgcgcgtgacattcgccgttttttcagagcggtaagcatgagcgtcagcgcacgaagccgttccgcaaccccgaatcagtctacaccgttgc |
| | | agatcccgagtgctgatgatcaggactgggagttctgatgcgcctgtacgcttctggcacctcggtacgtggtcccgcacaccaacaggatgatgaacccaatcaggatgct |
| | | gtagggatttacggtctgcgtggtggctggtgtattgccgttgctgacgggttgggtagccgatcaaaaagtcatttgggttcccgtaaggcagtcaatctgctgcggcagatc |
| | | atgcgcggtgcggagatgctggtcgctgccgaagtgactccagcgttacgtgaagcttggctaaaccactttggtactgactatcacgattacgaaactacctgtttgtgggc |
| | | ctgtgtcgaggcgtcgggccatggcgtgatcggacaggtaggcgatggcctgctgctggtcagaagtgctggggtgttcaacgtaatgagcacaccacgacggggttaca |
| | | gcaatcacactgagactctggcacagcgtgcacatttagatagttgcagtgccagagtggcattaacccaacccggagatggcgtactgatgatgaccgacggtatcgctg |
| | | atgaccttatcccggatcagctggagtcattctttaatgctatctaccaacggatacggcaatgcagcaagcgtcgtacacgtcgctggttaacacaggaacttaacggctggt |
| | | cgactccaaatcatggtgacgacaagagcctcgctggaattttcaggatggactgaccacatgacatcaatagtaaaaacgcaaccaaaacgcgtggtgaaggataccag |
| | | gggatcaagttacgagctgacagaggtaattaaccgtggtggacaaggcattgtttaccggacgacctatccgcaaaccctggtgaaaggttttactaatcaggacccacag |
| | | gaacgccagcgctggcgcaaccatattacatggctgctcagccaggatcttagcgacctcaaacttgcacgtccattaatacttctggcggagcctcgctttggttacgtaatg |
| | | gagctgatggatggcctggttccattggatagcctgttgaacagctttataaacgcaggggaggagtctctggcggattatctgcgtcagggaggactccgtcggcggattc |
| | | gtatcctttgccagctggcacgcacactcaatcagcttcacgcacgcggcatgttgtatggtgatctctcccccagcaatatttttgtttcagacgatccaagacacgcggaga |
| | | cctggcttatcgactgcgataacatcagcctgacagcccatcacaatctgactctgcataccgtggactatggtgctcccgaagtggtcaggggagaatcgttactgtccagc |
| | | ctgaccgatgtatggagcttcgccgtcattgcctggcaactgctgactcataaccatccgtttaaaggggaactggtcagtaatggtcctcctgagatggaagaagctgccat |
| | | gcgcggtgaatacccgtggatcaatgacgcacaggatgacgcgaatcactgcttcgtcaatctgccaccggagctgattgcacatagtgcactgccaactctcttcgctcgc |
| | | tgctttgaacagggaaggtttgaacctcatgagcgtccgggtatggctgaatggcttgaggcgctgagtgctgtggatgagcgtctgtttacctgtgacagctgtgggggaa |
| | | gcacgctcctggcagaggaagcagaaagcgcgaacgatgccgtttgcttttactgtgacagtcccgccgaccgcctcctggtccggtttagtgaatatgtgactgagcaaca |
| | | agacggctcgaatccagacaccaaaaccttgattgccacagggcgaaatgtatggctgcagccaggtcaccgtgttgagttaaagcgcctgttgccaagttttatctatgacc |
| | | actggccatcagatcatctgcagattgattacaccgcccgcgggattgggatccatccgttgcttggcggagagctatacctacaacgcggtgaaactatcaaaccactgcg |
| | | ggggtttcagggactcaaaaacgagctgcgcggaacaggtggggagccttggcagatccatatcggcgatcctggccagtcgcatgtaatctggcagttcacgtggtgac |
| | | aatatatgaaaattaacgaatttccactgatgtccaaagatattctgctgctggaaacggataaaggaaccaccgggttccggccaaagcaagctatcacctttcaggcgtatg |
| | | gtgagaattggctggcggtacagggggatcattgcgtaagtgtccagtgctcccctggtgatcacgaactctttagccgtctggtgatgagggatcaggttcgttggttgctga |
| | | ccagtaaagcggaaaaacagttgcgggttcaatattgcacgcctgttgaagtcacaccaatgcagctcgagttgggaattgatgagcgaattgcggaagaccttttcgcgaa |
| | | aaaacagatcaataacaacgatattgagcttgcctgccgctggtttgaagagacttttattgtccatagcgagtcagaaagtgactggttaacggttggccgttttagcaatcat |
| | | gcagccaaaggtggttttcagctattgggaaacggctggcgtgcggatgttgagcgcaacccggaccacggctttcttatcagacgtattactggtcatttaagccatgatac |
| | | aggcttctcgttgctggttggacacttcgccttccgggatatgtcagttgctgcggtgctgaatagtgcaacccagcaggcaatgctcgatgccgcactgcgagacagtgcc |
| | | agctaccttgagctctggaatctctacaacgataaagagtggcagagcgagttgaaaaaggccgaaacgctgggtgttctgcgctttgttgcgtgcgagggcaccgaagct |
| | | ggccgggaaaatgtctggcatctgactccccgaactcctgaagaatacagagaatttcgccagcgctggcgcgcgctcgatctgcccgcaggcactcaggttgacctggg |
| | | cgctgaaactcccgactgggcagaagaactcagtaccgaagaggatacggtactgaaaacgccgcgcgggaagatcgagttcgctgatgaatatgtggtctttacttcagc |
| | | ctcgaatcgccgagacgtgcgccccgcaaagcctgaaggatggctctacctctcgttggcaggatatcgcacagtcggcaaacgtcgcctggcggcaaaacgtgccattg |
| | | attccggtaaacgcatgccacagttgaagtggctgctggaaggggtcgttgttcctgctgctcggcgtcgcaacatccaggggatgacaccctacgcccgcgaaatctttaa |
| | | gggtggcaaaccaacgggcaaccaggaactggctgtgtttaccgctctgaacacacccgacattgctatcgtaattggcccgcccggaacagggaaaacccaggtgatc |
| | | gctgcgctacagcgacgtctggcggaagaggcccaggaaaagaatattgctgctcaggttttaatcagcagttttcagcatgatgccgtcgataacgcgctggaccgcagt |
| | | gacgttttcggtctgcctgcatcacgtgtgggcgggcgtcgtgcttcagtagaagacgagtcaccactggatccctggttgtctcgccacgccagtcatctgcaggagaaaa |
| | | ttgctgaccagtatcaacgctacccggagttgaaaacaattgccgacctcacttcccggcttgccctgcagcgattggcaaacgacctgcctcaacaacgggcagaggcttt |
| | | ttcgcatatttatcaggacgtcaattccctggcagagaaagggctggtcacggactcccggcttgagatacgtctgcaggactatattaagcatctgaaacaggatggtgttgc |
| | | tgaggtcagtacggtgatgaatgtagcagtattgcgccgcattcgcgcgttacggaccactcagactgctttctcagatgatggtgccgatcgtgcctgggatttgctgcgatg |
| | | gttgaagcggaatgttcctgacatcgacgctgagctgacctcggtattggaaatagctgccgatgccagagaagttcctgtggcactcgtcgagtgccagcaacagctgctg |
| | | gagcgttttctgcccgattatcgacctccggccctcaaaaataagatcgatgatgaaggactggctctactgaatgacctcgacaagcatctttccgacttgatgcatcggcgt |
| | | aagcagggtgtggcatgggtgcttgaacaaatggccgatacgctggagatggaccgccgtgccgcacaggaggtggtggatgaatacgccatggtggtgggagcgacc |
| | | tgccagcaggccgccgggcaacagatggccagcctcaagtcggtttcaggagtcaagagcagtgacattgagttcgataccgtagtcgttgacgaggctgcacgcgcca |
| | | accctcttgacctgtttgtgcctatgtcgatggccacgcggagaattattctggtcggcgacgaccgccagcttccgcatatgctggaaccggatattgaaggccagttacag |
| | | gaggagcatcagcttacggcactgcaactggctgcctttcgttcaagtctttttgagcgcatgaggctaaagctactggacctgcaaaagaaagataatttacagagggttgtg |
| | | atgcttgataagcagttccgcatgcatccactgctgggagatttcatcagccagcagttttatgaaaaagaagggctggggagagtggaaccaggccgtagcgcagagga |
| | | atttgtctttgacgaaggtttcctgagagcgctggggccactggcgtcggcctatcgtgacaaggtctgccagtggatcgacctgcccgcttctgctgggctggcagaaaaat |
| | | caggaaccagccgtatccgcaccattgaagcggagcgtattgctcaagaggtggcacagttactgaaagccggaggagaaaccctctctgttggggtaattactttctatgc |
| | | cgcacaacgagaactgattatggaaaagttatccgaaatcaggctggaaggcgtgccactgatggaaaaacgtaacggaacctatgaaccgcatgaaaactttcgctgggt |
| | | gcgcaagtaccgtgctgacggttcgttcagccaggaagagcggttacgagtaggttcggtggatgccttccagggtaaagagttcgatgttgtactgctatcctgcgtgcgc |
| | | acctggcgtcagccgaggtcctcatctgccgccgatgatgcagctgccagggaacaaatgcttaatgaactgttcggtttcctgcgtctgcctaaccgcatgaacgtcgccat |
| | | gagccgacaacgacagatgctgctttgcttcggcgatgcagcactggccaccgctcccgaagccctggaagccgcgccagcactggcagcatttcataccttatgcggag |
| | | gcgttcatggcactcttcgctgaaacaggtatttatattcaatctgccccacggccgcagggtgaagcgcgcccgatactctggccagtcaggatacatagggtgctctaccc |
| | | ggaaagctatcaggctcagatcaatgtcttccaacgcgcaattctcggattggtacgagcgcgcgtcgtacgtccgaccgaactggcagaactgaccggtctgcaccctaa |
| | | acttattacgcttatcctggcacaaagcgtcagtaatggctggcttgagtccggtgaagataccctcacttcagcgggtcagcggttgctggatgatgaggatgacggtattg |
| | | gcaaacaaaaatcaggctatgtattgcaggatgctgtaagcggaaagttctggccgcgtctggtcagcacattgaagcaaatcgaaccggtcaatcctctggataaatatcc |
| | | gcaatttatactgaccaggaaaacaggagcgacactgcgacctttcctgatgaatgccagccgatcgccactgccgcctctggaacgcaaagaactgaagcgtgcctggc |
| | | gtgactatcgtgacgactatcgtgccagtcagcaactgggcgtcagccgtttgccgccacacattaacctgcacggtctgcagcagctagaggaaccaccgcagtgcgca |
| | | cgaatactggtgtggatcaccactgatcgagagagtggacagctatggagtgccgcggacccatttgctctgcgcagtaacgcatggtggctggacctgccttcaatcgtg |
| | | gaaagtgactcccggttgcaaaagatactggaaccgctggttgtggtgccacgcgccgcagaacaaacctaccagcagtggcttgaggctatcgcgcacgaaactgatttt |
| | | aagatgatgagtcaatacccttgggccgaacgtttaccggatgtgaaacgttatttggtggcgctattggtacatagagggaggatcgagcagggtgataacggtcaaagtg |
| | | agctggatgccgcactgaacgagtgccagaagctgctggaggttgttatgcagtggctgattcgtcgtcatccagccaacgcggaattattacccaagggccgcctggata |
| | | aaattaatacggccaacttgctcaaggatatgaaaataccagcatttaccccatcagttattgatggcctatctggccagataatacgtcaggtgcgctacgcatgtagcaacc |
| | | catccggctcattgaaggcactactttttgcagcggctgtcggtgcgaaccaggatccacagcacccattttggtcactggatgactcagcgttacaactgccaatgctgctgc |
| | | aactggcggatcgtcgcaacaagagtagtcatggacagagtaaatatcttgataagccggtacaggaactcactcagcagatggttgaggaaagtatcagttatgcattgag |
| | | ttttaccgaacgttttaaggaatggatgtaatgtcaaaacgagcacaacagaagtatacctcacctattcccaagcagagaaatggctctgctgcggcatctgccatcaccaca |
| | | cttcagaggtctgcaatgacaaccgagtcgcagattattgccgcagcccatcacacagctcagagtgaaaagcttccaaaagatatcgattttgatgtgacatggctggaacg |
| | | tatcagtcaacgtcttcagcaggaaggagatgatcaatttgtctcctggcttcagacatttactcttttctgccagaaactggcgcaaagggatgaagagacgcaagcagcag |
| | | cacagcgtattcaacagctggagctgacgctggaggagcaaagcgaaaagttagaacaggaccgtgttgaacatgacattcaagctcgggaactggcggaaaagaaag |
| | | ccgggatcgtgagcaaagaacgagagctgaatgaacgtgagctcaacgccaaagcgggcttcagcgagcagaatgcagcatcgctgcgaaacctgacccagaggcag |
| | | cagttactcgaccagcagcatcaggaggatattcaacagctcatcacacaaaagcaggggttaatgcgggaaatatcgcaggccattgtccagttgacccagttacaaatcc |
| | | agcaaagcgacgcggaggcacagcgcagcttgtcactggaccagcgcgaagaagacatcatcaggaaagaggaggatctgaagcgcgccagccgtcgtctggaacg |
| | | agacgagcggtctgtagaggcggagagacaggcgctgaacgaatgtttggctgaagcaatgcaaacagaacgccttgagtttgaaaagaagctggatcagaaagagcgt |
| | | cagttcgacaaagctcaggaacgggtgcaaaacctcagtgaacgcctcatggaatgggaggaacttgatcaggcgctcaatggccaatccgcttcgcaaatgctgaatga |
| | | gctggataagttacgcgatgaaaaccgcgaacttaaaagtcagttcgcgcacactaacctagcagagctggagcgcgagaacaaatctctggccaacagcaaaagcgctc |
| | | ttaaaaatcagctggaaaatctgcttgcagagatggacaagctacaacgcgaggtggatcttcagcgagtggctgcgacccagcttgagacagtggcacgggagaagcg |
| | | gcttcttgagcagcagaaacatctgcttggtcaccagattgatgagattgaagctcgtattggcaagctgaccgatgccagcaaaacccagacgccgttccctgccatgtcac |
| | | aaatggacgagaagaatgggctcaacgcaaaacgtgatcatcgagaggtcggtgacctgaaaaattttgccagtgagcttcagcagcgtattgctcaggcggaagagagc |
| | | gtgcagctattctatccactggaaagtatccagctgctgcttggtggtctggcgatgagccaactgcacctgttccaagggatcagcgggaccggaaaaaccagcctcgcc |
| | | aaggcctttgcaaaagcgatggggggattttgtaccgatatttcggtgcaggctggctggcgtgaccgcgacgatcttctaggccactataatgccttcgagcggcgctatta |
| | | cgagaaagactgccttcaggcactctaccgtgctcaaacaccgtactggcaggacacctgtaatgtcattcttctcgatgagatgaatctttctcgaccggagcagtattttgct |
| | | gagtttctctcggccctggagaagaacagccacgctgatcgaaaaattgcccttaccgaaacagctttactcaatgccccggaacggctcgttgaaggacgccatattctggt |
| | | accaggtaacctgtggtttattggcaccgccaaccatgatgaaaccacaaatgagctggccgacaaaacctacgatcgtgcccatgtgatgacactaccgaagcacgacac |
| | | tcgctttcctgtcagggagatggagaaaaccagctattcgtggcggtcactgcatgaagcctttgctaaagcaaaaacgcaacatgcggaaacggtcaggaacatgctgga |
| | | gcaactgtccggtcatgaatttactcacctgctggaaacagattttggcatcggctggggcaaccgttttgacaagcaggcgatggatttcatcccggtgacgatggcctccg |
| | | gggcagaagctgggcgcgcgctcgatcatctgctggcgacccgtattatgcgctcaggtaaggttaccgggcgctataatattggcttggaatcggtcacacgactcaaag |
| | | aagaacttgaatttttctggattcaggtcggtctgcaaggcgatccggttgaatctatggcattgctggaggcagatatccgccgtctgtcaggtgcgcgctgatgtggcacga |
| | | tcgtttaactggtaggcaacatgcacatcttccgcaacggattgatcacgggcgttactcaatcgaggcttcccctctgacgctaaatggacatacaccgaattttttcggattg |
| | | ctggtcagcgacggcggagcaaattgtcggctggacgatacgctgcataacttcattcagcctccgcccggccatgaagaggaaacccggctgctggaggaagccatca |
| | | ccacgatcggtgccgcagttgatgatgacatcagtgtgctatcgccgctgatgccagcagctattgtcgataatcaaagccttttgctacattcgaacgtgcactgctggagg |
| | | tgatacaaaaaggacatttacagcatatatcacagcggccgcggctggatttacgttatgacgatgaggtggccgacgttgcccgcgtgcgtcgtctggcaaagggtgcact |
| | | ggtacatctggcgtcacactccgaatgctggcagcgtcagacactcggcggcgtggtacccaagcagatactggcacagtttagcgaagatgatttcaatatctacgagaat |
| | | cgggtttatgcgcgattactggataagatcgaacgtcatttgtatcaccggctgcgcactttgagaagcctgcaatctactcttgcccaagcactggacttctatcaatctcagg |
| | | aggtgaattaccgcctgcgcaatgctatttgtcagttgtgggggatgacttacgatgaggatgcgactgatggcgcatctcggcagctcaacgccacattggcgacgctgga |
| | | gcaaattttccgcatcatttccggtctgcgacaaagcggcctctatctgcgggtaagtcgtactgcgcaagtgacaggtggagttcatatgacgaatattttaagtcacgatcct |
| | | cactatggtcatttgcctttactatgggcacagttggctgacggggctcagcccgaaaatttgcctcaacaacgcctcagagtgaaccagagcctggcagctgcgtatagca |
| | | gctatgccgggttggtgttacgccatgcgttgcagccctggttacacggtaagagtgaaggaagctgggctggtcgcactctgcgacttcgccagcaaggcatggaatggc |
| | | tgctgagctgtgattccaatgacagtgccagtgaagagacgctgttgtctctggtgccatttctgaaccaccagcaggtagcggtagacctaccggaaaatcggtatatcgcc |
| | | tggccttgcgtggggcatttacagcaggcattacctgataaagagggctggattcggctttcacctttagatatgtactgtgtagagcgttttggcttactgatagataaaattctt |
| | | agccgggaattattgcgaaactttgcccgtccggttatccgtattccccggtgcgtattaccacttgctacaaaactgtcttcactgacagttgatcaacagttaaatcagataac |
| | | actgcatggggatctgactaaagctgagctggaacaattaacctctcatttaatcaacaacaatgctagcacacaggcagaggaaattacgctgcgataccgggaatggcg |
| | | agcattgcaacagtgccctgtctgcgaccatacaaccgaactggtttatcaatatcccggtggatttaaaaccctctgtaaaaactgcaataccgctcgttatttcagccagcat |
| | | gaaaatgcacacttttttgaacaaaccagaacagtagaaagagaaagtaaaaccttcctggctcaggggcggagagtttttaactttcagttttagcagggtttttacgactcgc |
| | | tgcatttttaaagagttaagaataatgaaacttcagggcatcttttatatatcggtattacgcaaatcagtagtttcggttgcgcgttttgtatacataccggcaagtgtccaatcaca |
| | | gtgaatagccaaaatcgccgggagcacgttcggtcagcctgcggacatggtttttatcacgt (SEQ ID NO: 402) |
| 40 | Kinase- | ggattcaccattatagtgacatgttcaagatgatgatatatctttgaaaagtgttctctttgcgaacggtatagaatttctagcgttacttttcataattacactttttagggttaggcag |
| | helicase | gcacaatctatgcgctgtcttagataactacatccatttttactggactaccaccaacaaaaatttagtggtgcaggagaaaacgtgaagtatcagatagtaggtggtgctggcc |
| | | tgcaccgcagcgaaaccaaaacagttgatatgatggttaagcagttaccagatagttggtttggctatgctggcttagttgttactgatagccaagggtcgatggaaatcgatat |
| | | gctaattattactgctgaccgtctgctattagtcgagcttaaagagtggaatggtaacatcacatttgaaggggggaagtggctgcaaaatggtaagtcacgaggcaaaagtc |
| | | cctatcagatcaagcgtgagcatgcactgcgactaaaagatttgttgcaggaagagttatctcgtaagctgggttactttttgcatgttgaggctcatgtagtgctgtgtggcaca |
| | | gctggtcctgaaaacttgccattaagtgagaggcgctatgttcatacccgtgatgaattcttgactataggtaacccaaaaaattacgaaaagctggtgcaacacactaacttttt |
| | | tcatctttttgaagggggaaagcctcgaccaaattctgatgaggcattacctataattaagtccttctttgaaggaccaaaagtcaggcctttgccactaaaagaaagcggttatc |
| | | ttgcgaacgataagccattctttagtcaccctcacatggtctacaacgaattcagggctacccacaaagacaatagtcaacacagaggtctgctacggcagtggaactttgat |
| | | gccttgggtgtagcaaacgcaatgcaaacattgtgggctgagatagctctgcgtgagactcgagtcggtcgcctagttcgtcatggcagcgcaactatgcaggattatatgtt |
| | | gcgtgctgtaagggaactatccgaggaggatataactgatgatgcccgtgagctgtatgagttacgccgtagttttagccgattagatgagattctagatagcgaagctgacg |
| | | gatggagtaaatctgagcgtattgatcgcgttcgtgcattattagctccattctcggaattacatagcttgggtatcagtcattgtgatattgacccgcacaatctatggtacgcag |
| | | gggatcagaagagcattgtcgttactggctttggcgcagcctcactggagggacataatagcctagagtcattgcgtccgacattgcaaagtgctccatatattttgcccgaag |
| | | atgcttttgaagaagcagttgagccctatcgcctagatgtattcatgttggctgtaattgcttatcgtatttgttttgcaggtgaatcattactgactcctggacagatgcctgaatgg |
| | | agagctccattaactgatccttttagcggtattctaaatagctggtttgagcaagctcttaaccttgagccaagtaaacgctttccacgtgcggacataatgctcaatgagtttaat |
| | | gcagctactaaggaacatagccaagaatttgatgaagctaaccagatttatcaagaattaaagcaaaacaaattctttcgcgaagggatgaacagcgttggtgtgttaattgag |
| | | tttcctccacttcctgaacagttgtctatggtttactctgctcttgctgctattgctacgactggcagcatcagttatcactgtgaacaaggtgggaaagctctgcaggtaaaattgt |
| | | gggatggtgttattttgacccctcaacaacctggtgttaaccgccgtatccacgcttttaagcaacggatcgataagcttacgcatataaatctgccaactcctaaggtgcagtc |
| | | ctatggactattaggacaaggcggcttgtatgtagtgagcgagtatgtggatggcctaccgtggtcacagtttattgctgagaacgtgttagtacaatcccaacgttttacaattg |
| | | cggaaaagttgatcaacaccattcatgcttttcatgaaaagcagttacctcatggagatctttgcccagagaaactgctggtacaagtcggggagcagacagtaattactctga |
| | | ttggattgcttgaattcagtgatgaattaactgcagataatcgctaccagccagagaatcccgaaagtactgatgcttttgggcgagattgctttgcagtatatcgtatggtggag |
| | | gagctatttagtgaagatatgccagtactggtgcaggctgagctagaacgcgcaaaacaaaccgttgacggtatacctatcgcgctcgatcctttgctgcagtcaattcgagc |
| | | accggaacaagctgagattaatcaagttgtggcgtctgagtcacaggataaggtaattcctgtttgctggggcacagatgattggccgcaagaagtgaagcttctagaacaa |
| | | aatgatgggatctattattttcaatgtaactggtcatctaacccacgctttgcgcatgaattgcgttgttacatcactggcctaggagagcggctattgatagacttagatcctgata |
| | | atcgcactattaatagaatagtgtatgaaaaaggattatcgatcgaagaaagtataaaggctggtaaatattcccaggctaaaattaatactcaactttcattacaacgtggctca |
| | | cttaatcagcgtaatacttttattgaactactgtttaacctcgagccagtaattgatgccatcattgagcgagctaatcctaatcaagagatggatgaagatgacttcgatagtagt |
| | | gagtcaagcccaattgagttatggcaggcattatctgatacagaagtagacctacgagatatagtcaacatcgactctactgactttcaggaatcaccgagtggttgcttactct |
| | | acccatatactacggaatccggtgctgacctcagctttgaacttgatgataagatcattgtttatattaaagataagcgtgaatcagtgcaattaggggaattgcagctaagtgag |
| | | actacgccgagtctattggctattcgctttgattttgatgctgctcgtaagcgaattagtagcggcagccagctacaattggaatcgatccgtgacaaatcatcaagagagttgc |
| | | gtcaaagagcccttcaacgggtaattgaaaacaaagcagagatccagcatctgccacagtattttgattaccaccagaaaccctgcatgcagcaaatgcaaccgcggccat |
| | | ccgcggagacattacgcgcactttatgatcagcctggacaacgttttaatgaacagcagctaatggcatttcaacagttggtcgagtttggaccagttggagttctgcagggac |
| | | cacctggaacaggtaaaacaacatttatttcaaaatttattcactatctgtatcaacattgcggtgtgaataacattcttttggtcgggcaatcccatgcctctgttgataatgtagcc |
| | | atcaaggctcgagagctctgccatacgaaaggaatggaactggatacagtacgtattggtaatgaacttatgattgatgagggtatgctaagtgttgcaactaaagctcttcag |
| | | cgacagattcagcataaatttcaccgtgaatatgatctgcgagttagctccctaggaaagcgcctagggatggccccattattagtccaacagttatgtcagttacatcgtacgc |
| | | tgaatcccttgatggtgacatatggccaatatagccgtgagctggataaagtagaacaaataaagagtagtagtattagtcatcaagagcgactggctgaattattagaacaaa |
| | | gcaatcagcttaaactgcgaacacaagaaattattaactcaatattcgatgacagcttgctgaaaactcttgtctatgatgaaaccttgataagacagttggctgagcaagttgc |
| | | catacaatacaattataacaatccagagaaccttgaacgttttatgcagctattggaaatgagccaagagtggatggatgtattacgcggcggcgaggctggatttgatcgattt |
| | | atgttcaaaagtaagcgattggtttgtggaactcttgttggtgttgggaatcgtcgactagaactagctgagtccagctttgattgggtaatagttgatgaggctggccgagcac |
| | | aagctgctgaattgatggtagcgctgcaatcaggcaagcgggtgctgttggtaggggatcataaacaattgccaccattctatcatcaacagcatcttaagttagcctctaaga |
| | | aattagaactcgggaaagggatcttttatgagtctgattttgaacgtgcttttaaagcaacaggcggcgtaacactcgatactcaatatcgaatggtagaaccaattggcgagtt |
| | | agtatcggagtgcttttacgctcaagatatcggtaaactgcattcatcgaggaaagtctcgccagattggtattccaagttaccaatcccttggaacaaaactgttacttggatcg |
| | | atagttcgagccctaatgaagcaggtgcagaagaacataagggtaatggtcgttactataatcaacgagaagtccggctactgctagaggctttgcagtcattgtcgagtgat |
| | | ggctgcattgcacagcttgagcaaactattaccacagaacagccatatcctattggtataatcacaatgtatcgtcagcaaaaagaggaaattgacaatgctatcagtcgggct |
| | | gaatgggctgcatcgttacgtggtttgatcaagatcgataccgttgattcatatcagggccaggaaaacaagataattatcctcagtctggttcgcgataatcccaacaaactac |
| | | aaggtttcctgcgcgacgcgccgcgaataaacgttgctatttcgcgagctcaagaaaggttattgattctgggagcaaggcgtatgtggtcaaagaccaataatgattcagca |
| | | cttggaaacgttcatgaatttattagtaaacaggttgcagtagatgaacccaactaccaaatcctgtgtggtcaaagtctgcttggagataacaactaatgtcagaaccacgtct |
| | | gggtaatctgattaccgttttactacctgcgcgtagttacaagatcaactgcgctttgaccactgaaaaactgatgcctggaattgaacagtttgcatgtcgcttgctgctgattttt |
| | | gatcaactctatcccagcgagttacagaattactttggtctaactgatcgtgagcgagaggtattgcttgatgggttgctggctaacagactgatcaacattaatcctgatgggc |
| | | atattgaggctagctcattcctacgtaagcatgcagctaataatggtgggaagccaagtttagttaaatatcaagaatgtacggaggaagttgcattcgatctactaactctttcg |
| | | atatgtaaaccgcaaccaaatcgtcgttttacttctggactgccagagctattgccgcggcatcagatcgggggagatgctgctgcggtaacagaggcttttagttcccagttt |
| | | cggcaccatcttttgctcagccgcaacagcgagtatgagcgtcaacggactaaattatataagataatgggctgtagttcgcatgagatggtgcagctcccaatagagataga |
| | | ggttagctacggtgtttctgctgggagcattgagccgcagaaatttactcgttcctatgaatatttaggtaacacccggctgccgctttcaaacgagctggaagctcatatcgca |
| | | gattttttgggagaacataaactagatgaattcggtatcgactgtgaagatttctgtaaactagcaaatgataaagtgttgttacaatttgctaatggttataagttcaactattccgg |
| | | ctggatagaggctcgtgaacaacgtaaaactggctacggtacttcattgactaccggcatgttaggggctgtttatttgccgcacaattctaagctgttcattagtatgttgcataa |
| | | tgcattacgtgattatataggtaaaacagctccaaaagcgctgtggtatagcagtaaagtaccactgtggggagctaatggtagtcaactttcgcgttttactcgcgctctaggc |
| | | gatatacttggcaattatgccgatgataagattgctcgcatttcgcttttacactcaagtgcagatgaaggtgaaaaacgtcaagagcgtaagcggcacttaggtcgttttcctac |
| | | cggtattggccttacttcagaggctaaatttgatcgtttggagatcctcttaattcctgatgtgattgctttggtgcaataccacggtcaacctaattctgatagtgcattaaccctgc |
| | | cgattggttatataactgttgagccagagcgtttagaattacttaaaaaactaatgattaagcgaactgaaggggctgttgcaaccattacttggtctgaatcaaaatttgaaaatt |
| | | tagcttcgctattacctgttgagtttctgattaaactgaataagaaaagcggtgaagatgtggatgctgcaataaaaaaaatgcagatctataaccgtgctgaaaccgcacggg |
| | | caattttatcgctacgcaagtagcatttatattgcaacgaataaatttttctaggttgctatgaactagctaaagggcaacaaatagataaacggcgttattcatgtcaaatgagat |
| | | aatgttaaattgatagggatttataccccgccggccattttgaatggtcggagttgttataaacgtta (SEQ ID NO: 403) |
| 41 | Helicase- | ggggcgaaaaggggaatgccggtcattgccggacgagtgcaccttaaaatgtgcggcagggggcgcccgcgggctgatccatttggcagaatggccgtgcatgcgacg |
| | DUF559 + | atcgagcgcgggagacggctgaccctgatggacaaacgcgctttgagcgagcgggacatctgcactaagttcatcacgtcgtggcttgacagatgtttgccttgaccggtc |
| | SMC + | gaatagccccattcggggccgtgtactttgcaaatgggccgaggtgcccgaaaaaccggtctggagccaggacaagaattacagtgcgcgaaccccaccggttactcac |
| | McrB + | agcccgcttattggagttgatcgaaacccatcccgaaggattgcgactcgacgaggttcaggcgcgtacgcgtgttgaagggtgtcgcgcgggagtcgatgatctcgcag |
| | DUF2357 + | cagcgctactcgatctccagcaccaaggtcttgcacatataaacgcagcccggcgctggtttccgaagcgggcggcgagtgtacgaccatcctccgcagtcactggttcgg |
| | ATPase | atgacgtggcgggtgcagggctggtgctgcaggcgctaccggcgcgcatcactggcaacgatatggcggtagcaccagcacctgcattgagtgctaccggcacctcgct |
| | | caagccgacttggggcctgttacgcagcctgctgccgtattacgccgaggcgctagcccgcaatgaacgggcgttgctactcggaacgcctgagcgctacggcgagcag |
| | | ttcctgctcgtggcaccacgcggccgatggtggccagcagcagggttaggctacgggctagaactctcgcgtacgcatctgccggttgcttttctcaccgcgttagcccgac |
| | | gcacgcgcgaaccgattcatgtagcctaccccatcgcgctggtgcggccccgcgacgccgcgcgcagcccctttctgttaccagtggcaactgtggcagcggactggac |
| | | cctcgacgccgagaaactgcgcctgaatctgccggcccaaacgccggcgatcgaatggtcgtgggtgcgcggacagcgccagcgcggacgccagattcgcgagttgct |
| | | cgatgcacttgatgtcaatgctgacgacgaagtctggcgggcaggctccttcgtcgactgggcgaccttcgtcgatcgtctcgctgcaaccacccctaccgaggtgcgcac |
| | | accgctcgatctcgctcagcccaacaatgagttggattgtggccaggcgggcggtatttacggggcgttggggctgttcctgtcgagcgaattgcagttcgcgcgcggggc |
| | | ggtgcgtgatctcaagtccatgacgcagtggtcagatgacgagctggccacaacggcgctggctgcgtgcttcagcgatgccatccacaaggcaccgaatccggtcatcg |
| | | ttccggtgctggagccgcttgtgcttggcgaggatcagcttgcggccgtgcgtgccgggctaaacgatcggctgaccgtggtaaccgggccgcccgggaccggcaagtc |
| | | acaggtcgccgttgccctgatggctagcgcagcgcttgtcggtcgcagcgtcctgtttgccagccgcaatcatcaggcgatcgacgcagtcgtcgggcggctggccgaag |
| | | tagttgaagaccggccgctggtaatccgtgccaatgcgcgcgaaagcgatgacagcttcgactttacccgtgcgatcgaagccatcctcgcgcggcccggtggtgagagg |
| | | cccggcgaagggctggctggctcgatcgaagtgctgacgcggctcgatgcggcacggaccgctgcgatcgaacaggccgccactgctaaccaagcgatcaacgaact |
| | | cgggcggctggaagcagcgatcggagatctgacggcagcccttggcatcgacgcagccgctccactaccgcgggatctgcccgctgccacacgacccttgcatagttgg |
| | | ctagagcgcctgtttgcgccttgggtacggtaccggcgactacaacggctacggcgtctagcgctgggatggggccagcttggttttggcgagtgcgacgaatcgacgct |
| | | ggagctacacgaacaacgtctactcgacctgcaggagctggctgcgctgcgggtcgagcgggatcaggcagaggcagccgtgcgtcaactccgttcaaccggcgatcc |
| | | gatcgcgctcggagagcggctgtgcgcttcatccaaattgcgtctgcaggggctcgccgaactgcttatcgagtgtgcgcctgaagatcgccgtgcgttgaccgcgttgcg |
| | | cggcgatctggctctggcgcgcggtgatggcgccgccggtgctgcccgtgctcgggaactctggtcggctcagcgagccctgatcctcggccagatgccgctatgggcc |
| | | gtgtcaaacctcggcgcagccagccgcattccgctggtacccgggttgttcgattatgtggtgcttgacgaggcatcgcagtgtgatatcgcttcggctttgccgctgctggc |
| | | ccgggctcggcaggcgatcgtgattggtgatcccgcgcagcttacgcatatctcccaagtgcgccgggagtgggaagccgaaaccctgcgcaatgccggcttgatgagg |
| | | cctggcatcggcagctatttgttctcgaccaacagtttgttccatcttgctgctgctgccgccggcgaccatcacctgctgcgcgatcacttccgctgccatgaagatattgccg |
| | | actacattagtgccacattctacggcaatcgcctgcggccattgaccgacccgcgtagcctgcgggcaccagtcggacaggcagccggttttcactggacgaccgcgccc |
| | | ggtccgatccaaccagcccgcaccggctgctttgcaccagccgagatcgaagccatcgtgcacgaattgcattggttgctgggtgagggcggcttcactggaagcattgg |
| | | cgtagtcacatcgtttcgcgaacaggccaaccgtctacgcgaccgcatcgagcattgtttgagtgccgaggcgattgcaagcgcacgattggaggttcacaccgctcacgg |
| | | cttccagggcgatgcgcgcgatgtgattctactcagtttatgtatcggtccggatatgccggctggggcgcgagccttcctgcacgacacgggaaatctcgttaatgttgcgg |
| | | tgagccgtgcccgcgccgtttgccatatcttcggcaacctggagtatggagctcactgcggtatccggtatgtcgaggcactgctggcacggcgccatcgaacaggcgatg |
| | | ccactgccagtttcgaatccccctgggaagaaaagctctggcgcgccttggctgagcgcggtatcgagacaacaccacaatacccgattgccggtcgccggcttgatctgg |
| | | cattgctgaccgacagtgtgcgtctcgatattgaggtcgatggcgaccgttttcatcgcgacctcgacggtcggcgcaaggtgggtgatctatggcgagatcatcaattgcag |
| | | gcgctcggctggcgggtcgtgcgcttctgggtttacgaactgcgggagaacatggatggttgcgtcgaacgcatccttgtccacatccgaagcaccgattactgagcatcac |
| | | cgttccccaccagcagcagccgtgccaccagcgaattggcggcgaatgcaactcgtgctcgggctggccggggctctggcgctggctagcctcgtcactgtattggtggg |
| | | tgtaatcggcgacgccaccgaacgcgagagttggcgagtacggcgtagcgagcatcaggaggtgctgggcgcgctcagcaccgcacgtgcccagcttgatgaggaagt |
| | | cgccaacctacgccgtaatcgtgctgcgctcgatgcagacctgaatcgtctccggaccagcgccgaagctgagcagggcggcgcagcacggctgcgtgaggaagtcgc |
| | | cgcactacgccaggagctcgccgccggccgcgccgagttggctgtggctacgcagcggcgcgacaccctgcaggctgcagtgaagacggccgatacgacgctggcg |
| | | gaactgaacgcgcgccgcgatgaggccgagcgtcagaccggtgaggcagcagaacgccggcgggtcgcggccgaagccgagcgggccgcgaaggcccagcaga |
| | | gcaaggccgaacaagcccgcgacagtgcggttgcacagcagaaggaggctgagcggcgcatcgagcagatccttcaggacctgaaaaccgccgaagaacgagtagg |
| | | tggactgcgcacgcaagaggctcaactaaaagcggctacaactgcctccactgccgaacgtgaccggctggatgctgaagccaagcggctcggactggagcttgtcaag |
| | | ctcgatcagcagcgccagcagcttgagcgcgatacccgtactaccgccgaaactcgacggacggccgaggggctccagcagcagctcgaccaagcgaaccgggatct |
| | | cggtaccgtccgcgaagccctgaagaccgcgcaggggcagctagccgaaacgcgcggccagcagacccaactcgccgacgaactggcccggctgcgcgcacagaa |
| | | aaccggcctggatggcgtgatcaccgcggctgctaacgctcaagcggaacttgacaaactgcaggctcagcagaaacgggcggagcaagcagcagaaacgacgcgtc |
| | | tcgatgttcgtcagctcgaatctcggaaaacggcactggaagccgacatcatcaaattcaccgccagcggcaaggatttggaaaagttccgtgccgaactggctgatacca |
| | | atgcagaactcgaacgtctgcgtcagcaattggttgaggcacggagccggcgcgagactatcgcgattgaagtggaacgcctaacgcaacagcgcggcgaactggagc |
| | | gcaccatcggttcactaacgccgcgagcgcaggaggccgaagcgctacggatccggctccagcaagacaacggcactttgctcgccctgcgcgagcagattgaacgctt |
| | | gcgcactgaacgtgacagcttgcagcagccggtcacatcttccatgcatgtccccggcgacaacgccgcggcacgctgatcaaggatcgcgctgatggacacgaacacc |
| | | ctggtctggcttgcatcgggtggcacgcttgccggcatcgtcagtgttatcaccgcattggtgtgcggcatgcactacggtgcggcgctacgccgcataccggctgcggcct |
| | | ttttggaagatatcgtcgcacgcgtcgcaactcgtcgcgaggaactcgaacggctggatgcccaattgggcgagcgccacaacggcctccagggcctgcggggcgaaa |
| | | cggagatgctgacggcccgccgggatgccttggcagcgcaactgcgcgaactgcaggaggacctggttgcactcgatgggcgccgggccgacatcgcttcggtgcgc |
| | | gatgagttggcggaagcacggacgcaacttgccatgctcgtcagtgaactgaccgaacggcggacgcagcaggagcaactcgaacgcgcggccgaacgtgcccgtgc |
| | | acaactgtccctgctcgaagaacgccggagcgagatcgaggcaatcgatacagccgagcgcgaagcacggatacggctcaccgaggcgcagacggaactgggcacc |
| | | gtcgtccaggcgcgggaagcggcacggcgtgaagccgaggcggcagcgcgcgacagggagatgctggcaacgaacatcgaccggctcaccgatgagcgcaacga |
| | | actgcgcgctgacatcgccagtctccaagccgaacgcaatccgctgtcgactgaagttcagggcctgcgccggcacttggagcagttgcatcttcagcagcaggcactcg |
| | | acggcgatcttcaacgcctgcaatccctacagccggtactggaagataaaatcagcggcctgcaacaggaagttgttacccggaccgctgaactcaaagaccttcaggcc |
| | | gaacgtgatccgctgtcgactgaagttcagggtctgcgccggcacttggagcagttgcaccttcagcggcagacactcgacggcgatcttcaacgcctgcaatccctacag |
| | | ccggtactggaagacaaaatcagcggcctgcaacaggaagttgttacccggaccgctgagctcaaagaccttcaggccgaacgtgatccgctggcagcggacattgatg |
| | | gcctgcgtcggcaactcgaaccgctgcgtacacagtgcgacgaagtcgaagcggaactcgcccgccgccgcgccgaactcgccgcgatcgagcaggagatccgtacc |
| | | aaaggcggtggtagcgtcggcaacccggaagacgtgctcgccgatctcgaacaggcaccggcttgtctggtcggcgacggcggcaggggaccgttgatgccgaatcc |
| | | gcagcgcgacgacgacgaaacagcaatgctcggccgcgtgcggacacaccttgatcggctccgtctgcactttcccgagcgcactctttatgcttttcatactgcgctcaag |
| | | acggcaacgattagtccgcttacagtgctggccggcatttccggtaccggcaagagtcagctgccgcgccgctatgccgaagcaatgggtatccatttcttgaaactgccgg |
| | | ttcaaccacgttgggatagcccgcaggacatgctcggtttctacaattatttggagaagcgctacaaagcgaccgaatttgcacgggctctggtgcatttcgacacgtacaact |
| | | ggccgcttgcccggcctttcaaggatcggctactgttgatcctgcttgacgaactgaacctcgctcgcgtcgagtactacttcagcgagtttctgagccaactcgaaggccgt |
| | | cccgccccgggcgatcgcgatcctgagcacatccgcagttcggaaatcgtgctcgatactggcggcgttggcggaccgccgccacgcatctatcccggccacaacctgc |
| | | tgttcgtcggcacgatgaacgaggatgagtcgacacagacactttccgacaaggtgctcgatcgcgccaacctgctgcgcttcccgcgccccgaaaaactggccggaga |
| | | aacgctggcgagcggcggcgagccggcggaaggcttcctgccggcctctcgctggcatgcgtggcggcgcagttttggcacgctgccggcaacgctgcgcgaaccag |
| | | tcgaacgttggatccacgatctcaatgagcatctagacgggctgcatcgaccgttcgcgcaccgtgtcaatcaggcgatgctcgcctacatcgccaactatccgggtgtcgc |
| | | cgagccgatggcgcaaaccagtcctctggatcaggcccgcattgcctttgccgatcaactcgaacagcgcattctgccgaagctacgaggcattgacctgggtgactctgg |
| | | agtcacccagcacctcgaccgcatccgtgcgttgatcgacaacgagttgcatgatgcaacactggctcgcgcctttcagcgcgccgcgcaagatgacggcagcggcagg |
| | | ccgttcgtgtggaaaggcgtacgccgtgaatcgatatgatcccgctggtgctggctatgccatggggactactggcacagactccgatcgccggccagccgacgcgccga |
| | | ccgttacatgacggtgaaacggtcgaactcgatgggcggtacggtgccatggtggcgctacccgagcggaccgacctgcaactgggcagtcggcgctggccggtgcag |
| | | gtggaaggtgccgcctttgcctggttcgagggatcctttcggttggtgtcgctgccgactgcagccttgaccagcgaacgtcagatccggttcgatcttctaacggcgggcg |
| | | agtctgtgctgagtgtcgggctcgtgttgcgtaatcatctactgcgtccgcgcggagccggacgtgacgatccggccgccgatgcattgcacacctttgtgttgcaggttctc |
| | | gaccgcatccgtgaggccgaaccgtccggtgccggagacgattgggatgatctcggcaccggttgggcgcggctgcgcaccgcctggcttgagcgcgatgcgcagatc |
| | | gaagaagcgcgccgcgatctgatcgtcgaacatgctgaacaactcccggcccacatcacagaaatcgctatccacccgcgtcgggtgctcaaacgcacccgcgagttgct |
| | | gccgatcgatcgtatccaggaactcgacaccgcctgtctcgaatggctgatccggcagcccggcgttaccgttgccgaaaaggccggtccgcgccagcgactgctcggc |
| | | atcgcgcgcgaggagcatctcgatacgctcgaaaaccgggtgctgaaagatttcctgcgtctgagcgtcgaggctgccagcgtctggcagcgggagaaccggcgttttca |
| | | caacagtgagcgcgcccggctggtcgggcgttatctcgcgctgtgccgcatgcatcatcgcgaactgtgcgcggctggcatcggtgaccccatgcccccggtcgctccga |
| | | atttcgtgctgcaacaagattcccgctaccgcgtgatctggcgcgcgtaccgcgaactgttgagcgctgagcagcgtatggacgatctctggcgctggcagtgtcggttgtg |
| | | gagcgacttcgctcggcttgtcgtggtgatgggggtgcaagagttgtgcgacaagccgagtgcgctctcgcccctcttcgtgcgcagggaacaggcaagcggacgctggt |
| | | cggacacgctcggcctgctcggtgtattcctgatcgacctgaacggcaggtcgtatgtggcggaagtctgtgatgcgagccagttgccccgaaacgacacgtcacgagcg |
| | | aagctggcgtcctggcagtatgcactcggttgcacagcactcatccgcctcatcgatttgtggagtgggcattgtgcgagcctgtgtgtctgggccatgcatagcgctacagc |
| | | cgagacgcttccgttgaccgagttggtcgcttcagccgatgaagccctgagtacggccatcagacaggaaggtctgcgcaacggcgagcaacttcgggcacgtggactg |
| | | gtgatccgctcggcgccgccgggaaagaccgagtacgccacccaggctgggcaggtctacggactgacgctggccatcgggtcggaacatatccgcgaggcgcttgg |
| | | cgagtgcactttgatcctgcaggacagtctggagcgcctgtttgcatgagcggagtgcacggcattgatctcaatggtgtgctcgattgcgtggtgcgcctcgatcgggcac |
| | | cgcgaccagcgccgacaccgccggtgatcgtctccggttcaccacagggcctgctgacgggagccgcggcactgcaatcgccctgcggccgacctggcatggaagcc |
| | | gaggaaggtatccgcctgccagtgctggccctgctgcacgcgctcagtggtgaggggcggcacgatacgcacgatacggccgtgctgctcggccgacacctgcgtagc |
| | | ctgttgtccgatgatacgcatgctgctgtcgtcgcagtgcctgacacacctggtttcgacgaacgagctcgcacccggctgctggatggcgcgctacgcgccgggctcgat |
| | | ctgcacctactatggcgcccggtcgcagcgttgcttggttggggcgaaacactgggaaacggcgaactccaagccctgcacggccggacggcctgcgtcgtgcagttgtt |
| | | gccggacggcatctcgattggcgatttcggcctcgaatgcgtggtgcagggtggccggccgacgttagtaccggtgcgccggcgcgacggcgaacgtcaattttactcgt |
| | | ggagcggtggtggactggttgcactgctcgcgcgcgaagctggaaccgacgaagccagtctgtgggtcggaccgtgggtatggaaggtcttgcttgggcagcctgcaga |
| | | acgcgaggtgctggccgacccgcatgcaccgggtggttggcgactcgccagcggtccttccacactgtgcggcgccttagccgcggagttgcgcacaggcctgcgtata |
| | | gcactcggagccgcgcgctcggcactgcgcaatgcagcggtcattctgatcgaggggcctatcgccgatgcaccgcttttggacgcaatgcagccaacactcgcgctac |
| | | gccagatcgtggctgcggaactgaccgtggtgctcggcccgacggtgtccgcaagactcgtcgccatgccgctcgccgatgctctaattgccagaggggccgctatctgt |
| | | gctgcgcgtcaagcggcgcggcagatcacgtattacgatttcctgccgatgctcgaaatcaatgtgctgcaggccggagagcatgcgttcgttgaactcatcggtcgcgaa |
| | | gagcgcatcgcggggggcatgagttacacgaatacgttggccgatcgcttcaccgttgccgcaagcacgcgctcgctcgagttctacctgctgaaagaggacgaagcag |
| | | gcgctcgtcacagcgaaacggtgctgccggtaccgccggcagccgacgtggaaatcagcctgcacgtcacgcagacacccgctcaaggctacgcacgcgtggagata |
| | | ctctcggccgtccggggcgcgctcggtgaagcaccgatcctgctcgattggtcagcgatgacagagattgaaggctcgcgcgaggatattctgcgcgaactcgaattcga |
| | | ggggctcggctatccggacatcgtaccgcaacgtgcacatcacctgctctgggattaccagcgcagtgacggcatgactatcgctgccgcgatgcgggccttcaattgtaa |
| | | gcctatcctaagttcaccgcgcaaccagtacaatcaattggttaaacaaacgcgcgcactcgtcgggctgcgcagcaatctgttttttctgacaaagggcaccagttctgatcg |
| | | tagtgcttacaccgccgtcgattcggatggccaattgccacctggaatcgcgccgacaatccaacaggaattcgaaaactttcgagtgcggctcgacacggattttgccgca |
| | | atcaccagcgtccgtaatcgacaagatatcgcaacccggcgtgaattggcgcgactgggcgcctgcttgtatgcagcgtgtcctaatgcaattgttcattacttccaacgcatt |
| | | gtcgcacgtagcgccgatgacctgacactggtgttgcatgccggcaaagtgctgagcaccgaaccagatcttgacagtcttttccattattgcgcgtctcgctacgatgaagc |
| | | catccgcgctgtcaagagactgtcggtccacgtggtacgcgcggcaggcgatgctttggcttatcatgaaaaagctggaggcattcttgataaccgaagcgctgacaagttg |
| | | gctgaagctgcgctcctattgctaaaggaggaaatccaggcacataattacaaaatacgattccgtgccgccgcgcgactcggcctatttctgttacgccaccggcagcggc |
| | | ggcgcgatttcctgcatccgagtagcgctgacacggctaatcgtcggcgtgccaaagagttcgatgccctgttgatccaggctatcgcatcgaagcgccttaaccaagatct |
| | | ggaaaatgccttggaagaaatccgtgcacaaatccgatatcgcggtacaaatgcgatcgttgatatcgatcctgacgaagatggcgagattaacgagaacgaagtggagta |
| | | gaggctgttgggcacccgctcgccatccctgtcgagcatcccggcttcgcgggcgcccatcccgtgcctttacggcgtgttcaacggccccggttcgccctgcgtatcggg |
| | | ctcctgctacgcccgtcgagacgcgctgcgcagactcgacgctcaaatggcttgacgccattctccctggctacc (SEQ ID NO: 404) |
| 41 | Helicase- | atgtctctggttttgaagacggttcgggcttttccgagaggtcggactaccgaagaattgcttgttctcgtcggtgcggctttctcaaatgacaagcggcttgcggctctcagcg |
| | DUF559 + | aactggagacgctatttcgcgatggtttgatagtgaaaggcaaggacggtcgctggcgtgcaaaggcagatggtttcaaacccagacatgagagcgtgtcggcttcgaga |
| | SMC + | ggtggagggcctgagggcttcgttgatgtcattcacgctgccaatgcattcttctcctcggaaccgacggcggccgaactacctgatcaagaagacgaaagttcagatgctc |
| | McrB + | ccgatccgcaagcgctactgagatattggcgctcggccttgcgtgccgatccacgaggagccacgacccaggttctcgacaaacatggaatcgagtgggccttgatctctg |
| | DUF2357 + | ggcgtggccctatcggtccagaagaagggcaaacgctgactgtttcaatcgaactcgacgcgattgatcctgcctttcgagaggctctggtgcgaagggaaggtcacgag |
| | ATPase | aacgcgcttgcagtgggttggccgatggcggtcggacgacgtggcggagttcctgtctttcgacccgttggcatgttagcagcagcttgggatcgtaaggatgaccgtctaa |
| | | tcctgacgattgatgccgatgacgttttggtaaaccctgattgggtcaaaagtgccgctcgtgccagcggctggaagcgcgacgacctcgctgacctttttttcgtggacgatg |
| | | ggctggggctgcgggctcaggattttgtggagaaggtaaggattgccgttgccagtcagatacgtggtcgcgttgtcggcgagaatctcgccacacagctcgatgcctcgg |
| | | ctcaagggatttttgacagcgccgcgatcttcctaccgactgactcttctttcaccgcgggggctgctcgtgacctggatgccattgcgacatggccgaaggaccgccttgag |
| | | agaactgcgcttggcgcggtattcgggtttgaccttcaagacggcacggacaaggctgctgcaatcgacgcagttccgctgaacaaggaacagttgcgcgcggttcgatc |
| | | cgcatgccaagcgcctttgaccgtcgtgaccggtccgcccgggactggcaaaagccaagcgatcgtatctatggccgcgtcagtgctcgcagatggtggcagtgttctcgt |
| | | cgcctccaagaaccatcaagcgcttgatgctgtggaggaccgtcttggctctcttgctccggacgtcccattcgccatccggacactgaacccgaatgacgaggcggatac |
| | | gggcttcaaggacgccctcaaacaactcatcgacagcgaaaatgtgacgcgcaacgcatctgtcgacgaattcgcattaggcgagctcaaaagcgacgcgatcgcgaga |
| | | agcgaagtggttagcgtgatcgataagatcacggaaacggaatgcgaaatttccgatattctggaccggattcaagtccgagaggatcgcgggcgccctgacaaccaaga |
| | | ctctgaagacgtggatccgagacaaagtctcttactccgctttgtctcttggtttggatcgcttttcgccaagcgtccccccaaagtagcgccagtgacagatcattcttcgtccc |
| | | gccgcggaatgaacgtcaaagagcttcattgcgcgctggcagaaaaaagatatgaacgcgatgcgctcgggacacctgacgatccgatcgccttaggcgagaagatccg |
| | | ggaagcgaccgagaatcttctgcctcgcattctgtccgcccggacacatctcccagaggatgagaggcgcgaaatcgcagaactctacgatgactggacattcgacgggg |
| | | gacggggacatccccctactgatctttcgcgcgtcctcatttcgcatcggcctttgtggcttgcatcgatcttgggcacgcctcgacgcatacctcttgatgacgggctgtttga |
| | | cctcgtgatcttcgacgaggcgagccaatgcgacatcgcgacggccgttccgttgctggcgcgcgcgaagcgggccgtcgttgttggggatgatcgacaactgtcattcat |
| | | ccctcaactgggtcaggcgcaggatcgcaatctcatgcaggctcagggcctaccggtcgccagaatgggccgtttcgcccagagtcgccgttcgctattcgatttcgcatcg |
| | | cgcgtgtctgttgccgacaacaggattactctgaggcaccagtatcgttcagcaggccccatcgtcgattacatcagcgagaacttctacggaaaccagttgcagacctcgta |
| | | tgacccgaggcgactgaacgtgccagatggggtgcgccctggcctcgcatgggaacatgttcctgctcccgcggtcccgcaaatgggcaacgtcaatccgtcggaagta |
| | | agcgcgattgttaggcacctgaaaaagctgatcgttgaagacaaatacactggcagcatcggtgtcataacgccgtttcgcgctcaagtggccgctatcgagaacgcggtc |
| | | gatgccgtcctggatgaaccgaagcgcattgcctgcgagctcaaggttggcacagttgacggttttcagggacaggagcgggatctcatcatgttctcgccttgcgtcggtc |
| | | cacgcagcccgcagtctggcttgaccttctttcagcgagatacgcgccgtttgaacgttgcgatttcgcgggctcgggcggtcgcgatgatcttcggcgatcttgattttgcac |
| | | gttcagggcaatcaaaagcgctggccaagctcgcttcgagggcgacggaagcgcggacgaaacggggcgaaggtgtgttcgacagcgattgggaacgcaaagtctatc |
| | | acgctctgaaggcccgaggtctggatccgcagccgcagcacgaaatagctgggcggaggctggacttcgcgttgtttggagcgaatgatgtaaagctcgatctcgaggtc |
| | | gacggacgcagatggcacgaaagcccagacggtcgtcgaaagacgtcagacctgtggcgcgatcatcaactgaagtccatgggatggcgggtgcgccggttctgggtg |
| | | gacgaactttcaagggatatggagggttgtcttgaccgagtcgaacaagacctatcgtaagtcgagcaggaacaccgcggttgcgttggggctgggtggcgccgccatcc |
| | | ttgcctcgggctttctcgtcctgcaagtcaactcgctcgatcgccgatatggtcgtatcgaggaaaatctgagctactacaccggggaactccaatccgcgcagcagcaact |
| | | ggcttttgctcgtgagcagtttcgcgaactttctgaccaaaagcaaagcttgtctcaggaagtcgcgagcgccgaacgcagccttcaaagcgcggctcagagagaggcgg |
| | | atgcgcaggctagtgtcgaagcaagccaggccaaattgactgctgagcgggaccgtttggccgaagcccaaaaaacgattgcggatgcgcagcgaattgaacgtgaaac |
| | | tgctcaagctttgctgcgaagaaatggcctcgaaacagaggtggtcaaactgaaaggcgatgtgcaggcccttaaggagagccagcaagagttgtctgctggtgttgacca |
| | | aacgcaatcggctgtcgatcgcctcgaagagagaagagctgaacttcaacgtgaagtggatagactcgcgcccgccgttgaagaccttcgtgcacaggagcggcttgtcg |
| | | aacaactgcgaggtgacgaggatcgtctcgaacagagcctcgacgatttgaatgcgaacattgcaattgcacggactgaattggcgaccagcgcggaaaaggtcgatgc |
| | | ggccgaggagaggctgcgtgcagggcaggaacaaatagcatccacagaagctcaacttgaaacactgaatttcgaagtcgatgacctcgagtcgagacagggcgaact |
| | | gcaggcaagtgtctcgggagcagagacgcgtcttttttcattgcaaaatgaactggagatcgcacagaacgcggtgacgcgagctgatgcgcagcgcgctgaaactaca |
| | | gaagcactcaacatcgctcaggaacagttttcgacgcgaagcgctcagctctctaccctccagtcgcagattgcatcggcagaggaagagcttgccgaacttgaagagag |
| | | acgggcggaattcagcagattgcaggctcaaatggaccagctgcaagcacgtcgaacgacactagaggaggttctccccgatcttgagaagcgagttcaagcagagcgg |
| | | gctaatttgggttctatcacgacagaagtggagacagagctcgggcgagttgctgtactcaaaggccagggttccagtctggaggccgacatcgagcgcctccaagagcg |
| | | tcgcgacgaactcgggctggaaacgcagtccgccactgctgaggcggaggccgcgcgcgcatcccttcaagctgagcttggtcaacttgcggaaaccgatgccctttcaa |
| | | gagcgcggactgccgatttgaggcgcttgagagaagctcttggagctgctgaaagagagctttccgaacttgaagagagacgggcggaattcagcagattgcaggctcaa |
| | | atagaccagctgcaagcacgtcgaacgacactagaggaggttctccccgaacttgagaagcgagttcaagcagagcgggctaatttgggttctatcacgacagaagtgga |
| | | aacagagctcgggcgagttgctgaactcaaaggccagggttccagtctggaagccgacatcgagcgcctccaagagcgtcgcgacgaactcgggctggaaacgcagtc |
| | | cgccactgctgaggcggaggccgcgcgcgcatcccttcaagctgagcttggtcaacttgcggaaaccgatgccctttcaagagcgcggactgccgatttgaggcgcttga |
| | | gagaagctcttgctgctgccgatgatgagctttccgagacacgagcggaactgatggacggacagtctgtggaacaggaaccagtatcaaccattagtgaaggcgctggc |
| | | gcccgtgaaaacgctcagtctgacaactccgcgccatcgagcaccgacaattgaggtaaccgaaaatgcttacggacaatacaatacttgtgctggcgattgcgggtgtcct |
| | | gatactgctcgccgtggttcaactttttctggccgcccgccacgaccgggcggttacggcagcaggcccgatcgaagagcttgccgtctacgagaagcggctggaagaaa |
| | | aacagcggctcatggacgatcttgaagctgaagtggaaaaacgtcgggaggcaatggccgtcgttactgacctccgggctgaggtcgacggtctacggcgtcagaagga |
| | | ggagctccttacagaatgggagagtctccgtgaacgtcgcgacgaagttgcggcagttcgcaaggagactgaggacgccgttgtcgaacgccagcaactcgaaacgga |
| | | gatcgccccgcttcgtgcggagtatctggagataaaggaaaggctggaaaaggcggaggagctcattgagcgcactgacgccttgagacgagagcacgacgaaatctc |
| | | cacacaggtcaaagatcttcgggacaagaagaggcaacttgaagaggccgaggaacgggtttctcgcctggaagagcgttccttcgaacttgagacatcgaatgctcggc |
| | | ttgagggacagaagtcttcgcatgaaagcgagttgtccgccttggaagcgcggatcgcctcggaacacggtgggttggcatctgcccaaaccgaacatgctcgcctcgat |
| | | gcagaggttgcggctctgaaccaggaaacccgccgctccaggggcgaaatcgagacgctccaggacactcgaagcgcgcttgatgctcgattggcacacctcaaggcc |
| | | gagatagctcgccgagaaggtcgaaccgtcgacggggaaaccggcgaaacggatccgcttcgcgagctcaatgaaacaccaccggtcattacggagatgaggacctg |
| | | ggacaacgcgccccgcgagaacgaggcggatgccatcaaacgcgtcgaacgccgcctacgcgcaaagggtctcgactacccggctcgcacgcttcgcgcttttcacac |
| | | cgccatgaaagtaaatgaaacaacgcagatggcggtccttgccggtatttccggaacgggcaagagccagctcccgcgtcaatacgcggccggtatgggcatcggtttctt |
| | | gcaagttccggtgcagccacgttgggatagtcctcaggatctgatgggattttacaactacatcgaaggcaagttccgacccacagacatggcgcgtgcgctttgggcggtc |
| | | gacgggcttaacaacgacgatgcggaacaggatcgcatgatgatgatcctgctggacgagatgaacctcgcaagggtcgaatactatttctcggacttcctcagcaggctg |
| | | gaaagccgtccgcgtcccgatgacgtcgacaatgaaaacgaacgcaaggacgctgtgatcgagcttgaaatcccgaacatggaacgcccccccaggatttttccgggcta |
| | | caacctcttgtttgcgggcactatgaacgaggacgaaagcacgcagtcgctatccgataaagttgtcgaccgtgcgaatatccttcgtttttccgccccgaagaaaatcaagg |
| | | acggacaggcagaaggaacggtcgagccgattttggccctttcgcaacagacatgggagagctgggggcggtcgagtgcgtctgtcgatggcggtcggcgtgtcacca |
| | | accggattgaacaaatggttgatctgatgcgtgacttcaaacggcctttcggtcatcggctcggacgcgcgatcatggcttacgcggcgaactatcctgaggttgaaggcgg |
| | | ccgcggtgtcgacgacgctctcgcggatcaattagagatgcgccttctaccgaaactcaggggcgtggaaaccgacatggctggccctcagttctcgaggttgatgaccttt |
| | | gtggaacgcgagctgggggacgacgccttggcccaagcaatcggtgagtcaatgtccctcgccgaggcaaccgggcagttcgtatggagtggagtcacgcgttgatgcg |
| | | gtttctggcccgtccctgggcggcgaaagcccttggagaggacgaagcctttgggcccgaagactgtctgatcggtagctaccagggggcgaacccaggcggctacga |
| | | atacgtgacgctcttgaggggaaacgtccgaggtagcgataccggaactgttctgtttccctatccaaagcgtgaggaagctgtcgggcccgcgcgtaagggcttcccggt |
| | | gcgcccaaggtcggggcacgatcctgccactccggacgaagaagaaggcgcagaggcccttcgacacatgaacgaagttcttgcacgtatccaagaactggaaggtgc |
| | | gattgaagacccaagcgatacatgggggcgcctgagggatgcttggaagcgcgccgaaaatgaagccgaacccaaaatggctgaaatcgtccggcaggcgcggggca |
| | | tgcttccggtgcttcgcgatctggaaaaacgcatccgccgggttctacgtaggcacagggagctaactccccttgatcgggtgcaggagatggatcggacctctatggtgtg |
| | | gctcagccgacagccagggcgaagcatcgcggaacgtgcaggttcttcgcaacgaattcttgcgacggttcgccgtgagaatttcgatacgctcgagaaccgtgtcctgca |
| | | tgcctacacgcgtcttgccgcagatgttgcacgcgaatggacccgtgagcaccctcgtgcgaaggacagtgttcgctacaaacaggttgaggcttttaggaaggcctgtcg |
| | | agtattgtcgcgaacactcagtgacctcggtgtcatgatcgcgtcggccggcgtccagccaaactatgtgctcatgcaagatcgcagctatcgagaggttcatgagggatgg |
| | | ctgaggcttctcttacgccgaaaaattgtagatgatctttgggcttggcaggccgaaacttggacggatttctccgttctttcgatcattcttgccatcgacgaattggaagaggc |
| | | tgaacttgtcgctcagtcgccgatttcgtggagcggtgaggcaacaggcggacgctggttcaatcaggatcggccaatcgccgtcttttggctgcgcgacaccaaccgcatt |
| | | gttgaagtccaagcacgccctgagcgaccaggaaccatgttgagcgcggcacaagcgcacgtcgccctcagaatttccgatcccaaacgggctgaccttccgcgcagga |
| | | tcgctgtctggacgccacatgccatgcgtagaattgatctcgaggatactgtgcggggggcagttcaactgcttcaccaaatccagcccctcgctcagacggaagttttgcg |
| | | gaatgggttgatcatgaccccagcacgtggtgtcgcagctgaagagagcgcaactcacggaagagcgatcgttacggcaatcgccataggcccagccggtgaagaccta |
| | | gcgaagggattccaggccgtgcgcgacttcattcgcagtgagctatacgaggtcgcaacatgatcgaccgaaaactatgcggcttcgatctcaacggatggagagatttcg |
| | | ttgcgaagaactggcgctccgtgccaggtgaagacgaggtcattggtccgaccgatatcgtcacaagtggccctattcgtcgatcgtgcggatcggggaaagccgcctcg |
| | | caggttggatcggaggaccgcaggctgacattgctccgcacggtcgcggtggtggttggggtgatgtcgggtcagaacaaagacgcattcccgttcggtcactgctggaa |
| | | atgcgtgatgacggggtcgaaaaactcgcccaggcacttgtgggatctgcgagcggttcggcaaacacagtcgtttcgatcgatgagggcccggatggcgatgaagccgt |
| | | ccaagagcaccttctcgaagcacttgcccgagggaagttccgaaatggctcattggtttggcgaccagttcttgccgccttgttcgccattcatcgcgatcaggtttcggagg |
| | | ggcagcttgtaggcgtcgtctcccatcagcgccaaggcttgtcagttcaaaagctgcgtattcgtagcgcaaggaatgtgctcgccccggagcgacgcgaggccgctgcc |
| | | catataccgtgcgacgctggttacgagtccctattccgaggtgcccgcaacgccgctgtcggggcagagggtttttcggcgcgcacagctcatcgtgcgatcgcaagctcg |
| | | gtcggaaaagctggtttagggatggattgcaatcctgagatgctccgcatgcccaacggcgattgggagctcttggaccttaataaatttgacgcgtcggaagtggtgagtgt |
| | | cccgagttccgagctcgatctggccgattgcgacgtcgttcttttcgagaccctttgtgaaggtcggctcaaaaaatgcctgagtgatgctatccaaagagcagctccagtcg |
| | | aggtgctctctcttcccgcaacggctgttgcggaaggtgccttggaagcagcacgccgagccggggacggggaaccgatcttcttcgactttctaccacgattgtccaccat |
| | | cgtgttcggatcggatggcgcaaagaatttcgatctcatacggaaagaagaaacgctcgaagcaggccggacctacagaagccctgaagcagcatctctcgcgataccg |
| | | gcagggcaggagagcgtctctgtctacctgaggaaagaggaagctccctggcctcgaaaggcaagggtgtcgcttggagctcctctgaagcatcaagctgccgtctcgct |
| | | gtgggtcgaacagaaaccggccgccgggcgagcgcggatcctcatggaatcgccggacttggggcggaatttcgcggtggattgggatgaagcactggaagaggaac |
| | | ggccctggtctgagatcatcgagagcttggatacgcaagtgtcaattcccaaacgtctggttcttccctgcggcatggaggcatggcatgacagcgatcgatccgcaggtat |
| | | gctaactttgctcgaatccgagcctaatcgcagccgcacggattgggcgacccttcggcaaaaactttcacagcgtccctttggcaaatactgcatctcaagtgacggcgac |
| | | gtgcctccggagatcgcggcagaaaccctcgagcggtttgaaattctgaccagcaaagcgcttgaggttactgaaaagcgcctgaggggcgaaagcggctacggaacg |
| | | gaagacaatgaggctctcaaattcttgagttggcagttccgccgatgcccgcgcgatgtcgcgacgtggctgatggactgtattgaagcgtccgggcgcaaccatccgttcg |
| | | tcaaacatcaagcaagttgggttctcgtatatcagggccttggccgcatcgtcggaaacgaagaggacgaagcgagagcaatgcggttgcttctgacttcgtccattgagga |
| | | ctgggtctggaaccgacaaagcgcggccatggcgttcatgctgtctcgttctgacagcgctccatcttacctggaacgagaagacgtagagaagctgaccaagaggactat |
| | | cgcggacttccaacgtaatatcggcggccaatatacaatgtttaactacgcgcctttcttacttgcaggcctgataagatggcgtctcgttgatcctaaagctttggtgatcggg |
| | | gccgacccgttggcggatgacctcttggctatcattgagaaaacagagcacgacctgaaggcccgttgtgggtccaatatgaatttccaaaggcggcggtcgaagttcttgc |
| | | ctatcctccaagacctgaagtcagagctggcgggagaaggttcgaatcctgacctgttgttggatatctatggagcgagcggaacgtga (SEQ ID NO: 405) |
| 42 | GTPase + | tcgcgatcaaggggtgagcaggggataaacgcaaagacattgaagttgaggagaatttagttgccttacctgcgaaaaatctgagcgatcttgcattaaagattttctatctca |
| | GTPase + | ggccgatgctcataagagcatttcctgaatttcaccctttttttgctcgccatccctctgcgaataaggacaccgcgccagatatgtcactcatcacccatacattagaaaacctc |
| | TM | acaaaagccttgcgtactgcgttgcgtgtctcaattgaatgcaatgagcgcagcgaaaatacccataaaattttaaacgtgttacgtcaggttgagctgacgctgatgctgcat |
| | | caacaacctatctatgccattgccggtacgcagggagcgggtaaaaccactctggcaaaaagcctgctgggcattgacgatagctggcttgaggcgaatccgggacggg |
| | | gcgagcagataccgttatttattgagcaacggcacgatgttcagggtgattatccgcaatttatttatgtctgtgctcaccacaaaaccggtgaaatttttgacagccagccgcg |
| | | cagtggcgatgagctgaaacagatgctgcgtgactggtcgcaaatggtgaatcaggagatagaagggggcaaaatcctctatccgaaattaatcattaataagtcagacagt |
| | | tttattgatgaagagatggtctgggcgctgttgcccggctacgagatcagcaacagccagaatcatcgctggcagggcatgatgcggcatgtcatggtcaacgccagaggc |
| | | gtgttgctggtcactgacccgacgttaatggcaaatacgaaccagagcctgctggtgaacgatctgcgcagtgtgttcgccgatcgttctccggtgattgtcgtgaccaaaac |
| | | agaaagcctgaacgatgcggagaaggccgaggtaaaagcgagcgctgccgcactttttcatgagacctcctcaccggtggtcgctgccggtgtcgataatcaagcgcagt |
| | | ggataggtgagctccgcactgcatttgctgagggtatccataatagcgccgcgtcagaagcggccgcgatcgaacgtttgatgactctggtcaatgacgatgttgcggatatt |
| | | attgataacctgaatctgctgtacgcggagcaggacagtggcgaggaacgtaccgtcgctattcttgaagcgttcgataaagcagccgagcgctatgaacagcaactgcgt |
| | | aaagccatcaaacgagaaactgacgggcatcggcaaaaagccactgaatcttgccagcgccgttatcaggaagaagaagaagggccggtcaataatttaaaaggactcg |
| | | gtcgtcgtctgatgtttcagggggcggagattgatcgtgaacgcaaaaatcgggtactggacgcctggcaaacccgctttgagcagcaatctctggccgatcacaatatggt |
| | | cgcgctggaaacgctcaaccgtcgtgagttgaggcattacggtctttcacaggagacgctgtcaccccaacggttgacctcgcccgcggcgacaatgggatatttgtcggt |
| | | ggctgaggaggataatttttcctcgctggcccctttgcgccatctgctgggatcggctgcaacaagggatgcgccgccgcagttagaccagctttccacggtattaaaagtgc |
| | | tgcctgccatgacgatggaatatgcgcgcggttgggtggcgatcaaccaggcgatgcccgcagcgtcagagctaaccagcgagttgcggccacaacaaattctcgacgc |
| | | gatttttagcgcgcagagtagcatccacccggtgaaaaccgcgctgatggcgtttatcggtgccgacgccgcggacggcacgctggatggcgaagtgggcactccgcag |
| | | aatgaagatagcggcgtatttacgcctgtcgcgatagcaggcaaagcgatgctggtcggtgcggcggtttatgcgttgtatcaggtggcgggcgtggtgagtgagagtgat |
| | | aaagctcaggcctggtatattgaacggatgatgaaggaactggcgcaatataatgaaaacgtcatcatcgagcgttatcaggacacgatgggcgatctgcgtcagctgattg |
| | | aaatcaacctcaaccgtttatttggcgtgcaggatgtcctcacgcagaaaagctatctctggttagctattcagggactcacgacggtacaaaaggaagcccggcagtatgaa |
| | | gccagtatcaaacaatatctggcgtgatatttgccatgagcgttatcgatgggcggaaaatagctacatcaacctgctgcgtcaggttgatgccgagcggttaatccagcctc |
| | | atgcagacatctcccgccagatatcggtcattgtctatggtccgacgcaggtgggaaaaacctccctgattctgaccctgctgggcgtcagggatgactgttttaaagaactta |
| | | accagctgctgcgtggtgggcaggcattaggtcacgcgtcaacggcgcgaacttaccgttaccggatatcacgggatgatgcctggtattttagccacaaagaccagggaa |
| | | caaccgcctggtcggatagcggggcggcagatattttcgccagcctgcgtgcagaggttcaggcgggcaggcgctactttgacagtatcgacgtatttattccgcaacgttt |
| | | cttccatcctcagcagcggcaaaatggtttgttaatccgcgacctgccgggtattcaggctgcggatgacaatgaaagggaatatgtgactcagcttgccagccagtttattcg |
| | | ttctgcggatgtgatcctgctgaccggcaaagcggattatttaggctttctgaaacccgaggagttgggtaatgacctactggctgactggttctggcagccacatcgctacaa |
| | | aattgtattaacccggacttttagcaacagttccattcgggaaatgttgcgccgtgtttcccccgataaatcctggctgcaggcttatttgtttgagcaaatcaatacgctggaatt |
| | | gcaacttccggcggagatgcgtcaacacatttatccgctcgaatgcggtcactcctggcaaaccctgattgaggggggtgacgattatgctgactattgccaacggttgcgtg |
| | | agcagatattaaccgacctgcgccatcatatgttgcaggcggtccatccactttctcgtttacgtacgggatacgccttacctgaattaattatccgccaccgggacaagttgca |
| | | gcagcagtacacagcgctgcacagcacgctggacaaagaacaggaatattacctgcgtaaaaaagagcagctgtcgtctgtgcagactgaatattcccggcatctggcaa |
| | | agagccagacacgactggacagattgcagcggctacgggaacggctgaataaaagacaggcgcgcaacgcgcatcaatccatcgctgtgccaccgatgggcacaaga |
| | | acggtcagtgccttactgaaaatgattgctgaggcaagagaagagatggcgcttcatccggcgttaaagcaccttcctgcccatttcgctgcgcaacagattaaccaccatgc |
| | | cttcacggcgattgagcaaaagctgcatggctatcatgcggataattatctctttgccagcaactataagcatgactatcaggaaacgatcaacgcgatcaaacaacacctga |
| | | aactgatcaccacattagccgctaatttccagcgtagtgagctggagagacacatcaaggaacatcgtcgtcgccagcaacgtttacaacaccacaccacccggcgagac |
| | | aaactcctgacggcagtgaccaataagcttacgcgcatcaatacgcagcaacaggaattaacgcacagccatatgcgtgacgaggatcattatcagcagctgattggcgag |
| | | agccgtcgctttcaggaactgatcagagtggcgaaaaatgaacgagccaccctgattgaacaacacattaggcgtacggatattggtcaggctgagcgactggcctggcta |
| | | ctcgctgcccgtgcgttaaagaaagactacgaatatgtcagagcattaggagagtagtgcatgtcagtggaacatgacccggttattgcgcaggataatgacgagcggatg |
| | | ctggatgaattggtgcaggaactgtttctgaccttgctgacgcgtgagctggcgcaacagaaagcggttatcgaaaccattaatgacaacgtctcgtatcaggctggtgagtc |
| | | attaaaatcgttgaaacgggagatcaaactttccatcagcaccctgtcgaatgcgcaacagcaatatcaggaagagcaggccatcgccagggaggaatacgagaagcgg |
| | | ctggagcagcagactcaaacatttgccagtgatgcggaaaaaaatcaccaacagtcacagcagcagatggcagcacttcggcaaggtgagcagcagctggctgcacagt |
| | | taacagatttgcagcaacagcatgccacacttcatcagcgctcaggtcagatgctgaatagcattaaatggctggtggtggggctggggggcgtcaacctgctgctgtttgc |
| | | ggctgtcatcatgatgttttttctcgggcatcgataatcatccgcgcatgcaggtttgtccggatatggtgcgcctggtgcaccatgacttttctctggcacggataaacggacg |
| | | cacaggcagcgaatgacgcgccctgaataaactggcacaacttctgcattcatttcctcaggcttgtatacaaggccgcataccg (SEQ ID NO: 406) |
| 43 | TM + | atcagggcaaggaccgttgcccatatgtgactggttttggtgtcggctatgtggccaggctgcgtgaaagctactgatcgctttttaatctaagtggtggatttatatgatcaatc |
| | GTPase + | attattgataaactcatgaagaaacctaatttatttaataaaattaaaaagtatacgattagatattgcgggtgtagatatgactcaccacattaaaggtcaaggcagacatcaggt |
| | GTPase | gacgttgctctctgacgtgcttgatgattttgtcacagaagataaaaacacgttgaagagagaaaaatgaataccgcagaagactttaaccgcctctatgccgacgtttcacgc |
| | | aatattcagcagacgctgactgatatcgctgcacttcatgttgaaaatgaagagggaaagcagcagctacaatcgatggtcactcagttgcaatccctgcaggatggctttaa |
| | | ccagaagctcacgtggctgcaaaagcatgccgaatgggacaaatttaccctggcattctttggcgaaaccaacgccggtaagagtacgataatcgaatcgctgcgcatcttg |
| | | tttgacgaagaatcccgccgccagctgctgcaaaaaaaccacaacgacctggaaaaagccgagctggaattacaggaaatctcggaacgactgcgcagcgacttagggc |
| | | ggatctatagcgatgtagtggataaaatcaccgatatcagtttttccgctctgcgtctgatgcaaattctcgacaatgaaagcgccctgcgtcacaaacgggaagaggaagag |
| | | agcaaggaacgcctgctggttgaaaagacggaaagccagtcgcgattgcaaattctgcaaaaacacaccagcgccaaaacacgattaaccctgtgcattgccgccgtcat |
| | | ctcttttgtcgcaggcgcaggcgcgagcgccgccgtggtgttcaatatgatggcggggcaataggatgagtaacgcactagatcttcaggctagtaccacgtcagtacgttc |
| | | gcaacgaaagtcctcattgaatattcaggagctcctgaataaaacgctgcctcacctggttcagaccataatcaggaatgagagattaaaaaacaccctacttcaggttgatg |
| | | gtctcattatcggtaccggcgaggcggattttaccaaagggaatacccgctacgccttacatattgacgataagaccttccatctgctggacgtacccggcattgaaggcaat |
| | | gagtcacgctatatcagccaggtgaaggaggctatcgccgaagcgcatatggtagtgtacgttaacggtaccaacaaaaagcctgaaaccgccaccgccgaaaagatca |
| | | aatcatacctcgaatacggtacgcaggtttatccgctggttaacgtgcgtggatatgccgacgcctatgaattcgaagaagatcgccacgatctgatgcagcaaggaggcgc |
| | | aggagaagcgctgaagcaaaccgtcggggtactgcaaccggtgctgggctccgatgtgctgcttcccggtaactgcgttcaggggctgctggccttctgcgggctagcct |
| | | atgacgatgcgacgcaaagcaccactatccacccctcgcgcgcgcacaacctcgccacgcaacagaaacgctatttccagcacttttcttctcgtcgggagatgcaggaatt |
| | | tagccagattgacgccattgcccgcgtcattcgcggtaaagtcgccacttttcgcgaagatattgttgaaagcaacaaaggcaaagtgcgagagtcactgggtcagtatctac |
| | | aggtactaaacacgcaactcaccaatcatcgcgcattIctaaagaaaacagagccggaatttgacaaatgctgcgtcgcctttgctaacgccattgcagcctttgaacgccga |
| | | atcatcaataaccgccgtaaccgctggaacgactttttcaatgatctgatggaaaaaagcgacgacattgttgaagacgattttggtgataaagaggcgattgcccagcgtatt |
| | | agccagcagtttaaatcgcgtcgcgtcgaggtgaaaaaattaatgctccaggacactgaggagggcgttaaggccttacaggagcagatgattcaagcggtggctcgtttgt |
| | | tgcaagatattaagcacattgagttccagcagcatgtcgatttcgcccacggcggtgaattcgaatttggtcgcgagatcgcgctgggttatgaccttgggttaagggatttcg |
| | | gctcaatggcctttaaaatcggcagctacgccttaagcggcgccacagtcggtagcgccttcccggtgatcggtacggccattggtgccgtagcaggcgctttagtcggcgt |
| | | cgtcatgaccgttgtcggtttctttaccagcaaagcgtcgaaagttcgcaaagcgcaggggaaagtgcgcgacaagctagaaagcgccagagataaagcgctggacggt |
| | | attgatgatgaggtccgtaacctggttgcggctatcgagaatgaactgaaaagcagcctgctgcaaaaagtgaatgccatgcatacggcattgcagcagccgatcgccatttt |
| | | cgaacagcaaatcacgcaagtcacccatttaaaaaatcaactcgagaacatgccttatggaacaattcaaacagttcagtattgagaagcaggctgccattaactcgctgcta |
| | | cagctgcgcggcatgctggaaacgctgggcgaaatggagatcgatgtcaacgacgatctgcaaaaaatcgcgtcggccatcacagccgttgagtccgacgtgttgcgcat |
| | | tgccctgttgggggctttttcggacggtaaaaccagcgttatcgccgcctggctcggcaaaatcatggaagatatgaatatctcgatggacgaatcttctgaccgtctgagcat |
| | | ctataagccggaaggattacccggagaatgtgagatcgtagataccccggggctgtttggtgataaagaacgagaaatagacggcaaacaggtgatgtatgaagatctcac |
| | | caaacgttttatttccgaagcgcatctgcttttttacgttgtcgatgccactaatccgcttaaagagagtcacagcgccatcgcaaaatgggtgctacgcgatctgaataagctgt |
| | | catcgaccatcttcatcatcaacaaaatggatgaagtgactgatttaaccgatcaggcgctgtttgcagaacaggcggccatcaaaaaagagaacctaaagggcaagctac |
| | | agcgcgcggcaaacctgaatgcgctagagcttgaacagcttaatattgtttgcattgcttcaaatccaaacggtcgtggccttcccttctggttcaacaaacctgaacattacga |
| | | aagccgctcacgcatcaacgatctcaaaacagttgccgctgagattctgaaaaccaatgttcccgaagtgctgctggcgaaaactggcatggatgtggtgaaagatatcgtc |
| | | acccagcgtatcaccagcgcccagctgcatctcagcaaactcagcacgttcgttgcgaaaaatgatgaagatacttcgcgttttacatgcgatatccagcaaagccgtaacg |
| | | aggtcaaacgtctggctggcgaaatgtttgaagaacttagtttgctggaaaagcagctgatgagccagctacgcccgttggagctggatggcattcgcccctttatggacga |
| | | cgaactgggctataacgatgagggcgtcggctttaaattacacctgcgtattaagcatattgtggatcgcttttttgcgcaatcctccgccgtcacgcagcgactgtcggacga |
| | | tattactcgtcagcttaattccagcgagagcttcttaagcggagttggcgaaggggcatttaaatccctcggcggcgtgtttaaagggatttccaaaattagcccggagacgat |
| | | taaaaccacgatttttgctgcacgcgataccattgggcaattaacgggctatgtctacacctttaaaccgtgggaagcgaccaaactggctggcggcatcgctaagtgggctg |
| | | gtccggccggggccgcatttaccatcggctctgatctatgggatgcctataaagcgcatgaacgtgagcgagagctggaagaggcgaaaaatgagttgacccggatgatc |
| | | aaagatccgttcagcgatatctatagcgtcttgagttcagatgaaaagacgttcgctttctttgccccccagattcaagagatggaaaaagtcatttgcgatctgacagaaaaaa |
| | | gcgacaccattcggaagagccagcaaaagctaagcatactccagcagaagctcgagcagtttaaccgttcgagcgagcagcaagtgtcctgatacacaaacggcagccc |
| | | gcaggccacgtttagttataaatcaaactaaacgtggccaggtgacatgccccccgttgattaacacacgttatcgtcgggtggaaaggacaacctcctacgtccgcttcaca |
| | | gcggacactcaggtttaacagtccagtacgtttagcttacggataaatcattttatgatgatgtggagaatgggggat (SEQ ID NO: 407) |
| 44 | Dcm + | gacagcttccagggtatcgtggacgcgtcatgcaaagagatggggatgagggattttaatattctaccccttgtaccccatgccagtggtcgacctcataaatcattgattttaa |
| | HerA + | aagcctcacttagggcgctcgctgccaccgatgccccacgatgcctgacgatcttcaacgactccccgcaaaagtccctatgcctcggaaaagccgccaaccccaacaac |
| | Vsr | accacctaacaacaagaaacaggacctcgtgccgagcttgttagcgcgactgactagccgtccgaaagcaaaaacaccgcgagccaaacaaggcaatttcttgcccccct |
| | | aaggaaccacctgaggattgaacaccagcgcagcttactgtatataaaaacagttaaagtcctgttctcaggctgcatctggatcacacagccgccgttactcggaaacacg |
| | | gcggattagcgcgcacgctcaggccctccagccctaacggaatatgaatatccagaaaatcaaacacatatcagcctcacgcagcgcatagcgccctgccagaacacag |
| | | caggaagtcattgcgtttgcgttcctggcaatccatcattcacggttagggcccctataagacctgcagaagcagcgcgccatgggcagacccggcaaaagcccccaaac |
| | | gggtgtggagaagctttatggagaaggaaatcccccacgaaggattcacaggctctagtaaagagccgctccagacgctccttccctttaatatcgatgaacccgggcagg |
| | | agcccatgaaaatccaagatttccccccactccccgcctccgaacagccgttgatgtttgcagacttgtttgcaggctgtggtggcctgtccctcggtctctcactttcaggcat |
| | | gaacggcgtgtttgccatcgaacgcgacaagatggctttctcgaccctatccgccaacttgcttgaagggcggaaggtgccggctccgcagttttcatggccctcatggcta |
| | | ggcaagaaagcctgggcaatcgacgaggttctcgaaaagcacccgattgagctcagtcagctaaagggcaagatccatgtcttggcaggaggaccaccctgccaaggttt |
| | | cagctttgcaggaaaaaggaatgaatccgacccccgcaacaagctgttcgagaagtacgtcgaaatggtccaggccatccgaccatcggcccttgtcctggaaaatgtccc |
| | | tggaatgaaggtggcgcacgccacaaagaaatggaagcaactaggtatctcgatcaagccccagtcctactacgacaagctggtagagagtctggacaggatcggatac |
| | | cacgtccagggcaatatcgtcgactcctctcgcttcggggtacctcagaagcgcccacgcctgatagtaattgggctcagaaaggacctggcccagcacctcgaaggcgg |
| | | ggtagcccgagcctttgtgctgctagaggaagcccggctcaagcagctacaagagttcgaccttcccgaggccatccatgccgaggatgccatctcggatatggagatag |
| | | gtcacgcgggaacgaggccctgcaatgaccctgactcccctaggaaattcgaagagattgcctataccggccctcgaacggcgttccaaaggctcatgcatcgaggctgt |
| | | gatggcaccatcgatagcttgcgcctcgccaggcacaagccagagataaaggctaggttccaggcgatcatcgacgaccccaactgtgccaagggcgtacggatgaacg |
| | | ccgagatacgccaagcatatggactcaagaaacaccgcatctacccaatgcaggccagcgctccggctcccactatcacgacactgccggacgatgtcctccactacaag |
| | | gagcccaggatactgaccgttcgggagtctgctcgactgcagtcattcccggactggttccagttccgaggaaaattcaccactggcggtagccaacggacgaaggagtg |
| | | cccgcgctacacccaggtgggcaacgcggtaccaccttatttggcacgcgccgtcggcttggctatcaaggcaatgttggatgaggccgtgatgctcgccggccaacagg |
| | | cagagcgagaacaagaagagaaaatgatagccatcgcttgaacacataggagtcgaggggaatggatagctcccaactggaaggggcgcaatacccggccgcgcttgt |
| | | cgactgggccggccatcactcaggaggcgtaaaaaggctgctggataaaaatagcggccagcctaacaagcagctgctacggacgaaccttttgtcccgtctccaggcct |
| | | gggctaacaggcttcccaccgagacctcagctgtccccaggattgtcctgcttgtgggtggtcccgggaatgggaagacagaggcaatcgagtgcaccatccgctggctc |
| | | gacgagagcctcggctgcgatggccggttggtcgaggaactctcgaaagccttccatccctcaaccggctccgcagtcccccggctggccagggtagatgccggcagcc |
| | | ttgccaagctagatagcagactgagcctcgacattgtccaggatgcctctgctaccgccgggcatgagggaagcaccgcccccgtccttcttatagaggagcttgccaggc |
| | | tactggatggacctccgacccaagcctatctctgctgtgtcaatcgtggtgtcctcgatgatgccctgatccacgcaatagacaacaatctggaacaagcacgaactcttctcg |
| | | aggcggttacccgggctgtaagcctggcgtacaacgcgccttcatgctggcccctcgagggtttcccatccattgcagtctggccgatggatgccgagtcgctcttggtaaa |
| | | gccggacgacgagcccgtagcccctgccgagatactcctaggccaagccactgctcccgatatgtggccagcgaaaggggaatgcccagcaggcgacaaatgcccttt |
| | | ctgcgccagccaggccatcctcgcgcgggatgagaacagggcatccttgctgaagatattgcgctggtatgagctcgccagtggcaagcgttggagtttccgggacctgtt |
| | | ctccctcacctcgtacttgctagcaggccaccatcctgtagtccacgatccctcagggactccccaccagtccactccttgccaatgggctgcgaaccttgtcgacctcgacc |
| | | aaaaggccctaacggcgaaaaggcatggcaagcagtcgctaactgccattttccacctgtcgacttcgagctaccaacatgcgctcttccatcgctgggacaaggacgcag |
| | | ctacctcgctccgccgcgacctcaaggatcttggcctcgagaaggaactcgagatggaggaagggcgaaccctaatggggcttgtctatttcctttcggagcgcaaaagcc |
| | | actatctcccagcgaccatcgcccctctgctggaggggctggtcgaaacgctagatccagccttcgcaagcccagacggagaagttgcagtcagcagtcgaaacacaata |
| | | gtcctcggcgacttggatatgcgtttcagtcggtccctggccggaggtattgaattcgttcgtaagtaccaggtgctatcgccaaacgagctcgatttactccggcgcctatcc |
| | | gcatcagacgccatgctttcgttaccgagcatacggcgcaagaggccggtggccgccagccgagtccagcacgtcctccgtgatttcgcatgtcgcctagtacgcagaag |
| | | catatgcacccggacggccatcgtggcggacgctcccattctcgaggcattccagcaggtcgtcgaggacagcgacaagcaccatcacctcttcaaggtggtaaggcaa |
| | | gtaaaggaattgctgaacactgggaaggagttcgaggtgtcactaaccactacctttggccaaccactcccccctcgacaacgccaggcaacgctggtcgtcccgcagag |
| | | cccggtccggatgtccccccagaacaacaagggacgccctcacccaccgatttgctatctccatgtcggccaagggcaatcagtccagccagtcccactgacctacgacc |
| | | ttttcaaagccgtgaaggaactggaaagagggctctcacctgcatcccttccacgcacagtcgttgcactgctggacacgactaaggcccggctttccggcccgattgtccg |
| | | cgaccatgaactactcgatgatgcccggatccgcatcggcgcagatggcacggtggtcggccgctcgtggaatggttttgctgaaagccgggaggacgacgtatgagcct |
| | | tgcggatttcaagcagaccccgtggagcaaatcacatccgaactaccagaagtcggccctggcaatcagccctgcccctgagtatgcgagctcggaagtcctgcttgcctc |
| | | gctctaccgaaccataggcttcgcaacagccagcgagggcggcgtgccgcaggccgggcgagatctagacaagcgtatccagaaactccgcgagaaacgccaatccc |
| | | caccaacaggagcggtagtcggtgtagaggcttggaatactgtgcttcacgggatcctggagagcccgaagcttcccaaccagtcgtccaagcgtttcctccaggtaacgc |
| | | ccatcgtacccggggccgcactcttctccgggtctgcccgtctgagcagcaactcgtggcccgcaggcagcttgattcgccgcatggtctgcctgggatcgatggatgggg |
| | | agacggcgcaacgactttggcaacgcctcttcgctgcattgaacgtggacgacgaggacgatgtcttcgcacgctggcttgaccaagagacatcggcgtggaacccggg |
| | | agcaagcaactgggcactctcgccaatacccgcggacgagatggtcacgttggagacggcagatttcctggggatcccctttctccccgcccggcgatttaccaaggacct |
| | | acaggccatcatgcaggccaagggttcaatgacccgccggcagtggactagccttctcgaggcattgcttcgcctggcagccgcatcccacgtgacgtggctgtgcgacg |
| | | tccacgccaggacttggagctgcctgtgggccgcactaacggatggcattgctccttccagtgaactggaagcaagacgggcgctgttcccggaagccccgcagtacatg |
| | | acgtacgggggaaaagccctccaaggcatcaaggacaaggtgtctagctacctaaatgcccggctgggaatcaatgccctcctctggtctctggcgcagataggagctcc |
| | | ctattctggcaacctctcctcgagcgccggaattgctgcactttgccagcatattcgtcagcacaaggccgagcttactcgcctaggcacgcttgagacgattgccgatgtgc |
| | | gcgagcaagaagcccgtgcgcttctttgcaagaaaggcatcggctctaacctgctggagtttgcgcggcacgtccttgggcaacgccaggctgcagtcccattgctgagg |
| | | gggtacgaccagggatacatcctgaagaagaaaggcagcagcccgtccagcccatgggttgtctccctcggccccgtcgccgtgcttgccttggtccactgcgcccttgc |
| | | aggaatgggcggtccccgctcggtccaccggcttggacagcacctagaggcttatggcatggccgtggacaagcatgacattggcaggaacgacctgggccaccagttg |
| | | cgaatgctcggcctagtgctagatagccccgatgccgaaagtggcatgctgctactccccccgttccccataaaccaagccagccagggcccggaacatgaatagacttg |
| | | cacactggcttgccgccactgtccacgagaaagtcaggggctcgacacaagggttcggaggtaccagcctagaatatcggcttatcttccgcggcccacccctcgagcta |
| | | ctcgaaccggcctacgacgagctggcccgcaacggagggatccaggtgccaagcggggcagacggaggactggtgaccctgccggtactgctccagtatccagccgg |
| | | ccagctgcagggacccaggccacgcatcggagcatccggtaagtgtgacaacgaccacttgcttgatatacgcaacgaccctgccaaccctagctttattgccctggtccc |
| | | gccgggactgcacaacaacctctcgatcgagtcaaccaccgacgaattcggattgggggcagccaccagcacggggcatgcatccttcgaacaatggtgggaggatgg |
| | | ctttgtccagcaagcagtcaacgaggcgttgatcgctgccggcataacggacgcccagagggatgacgccaggggcctggtccgcgcaaccgcagcctcggtcgacga |
| | | ggtggatccagacaagggaggtcatcgcgcggcctggcgcctactctcgcgcatctactcgatagcaaacgtgaatcaagggttgcctgcaggaacagcgctatcactgg |
| | | catgtggtcttcccccaatgaaggagggaggaatttccgccaagactcagctttcggtcctgggaaaaatcgccgacgagcttgcggacggtttcaagactggcatcgagc |
| | | gcctggcacaaggcgtccaacaaggggttgcgcaagcgctgcgcgaactgctttcccatctccactcgaattgcgacgtacctacggccttcgagcgtgccacagcggctt |
| | | tctacctgcccagtgccgatattgaactggcgcctcctccatcctggtggaccacgctcaccaccgagcagtggacggaactacttgccgacgagcctgacgaggtcgtcg |
| | | gcgagctaacgatccggtgtaccaatagtttgatccctatggggaaaggcttgccggccgtagtacgggacaaagtcgagctattgatttccacaagcgaagagagccaac |
| | | caaaggagctcctgttgacaggcggatcctacggcaaggttccgacgtcattgccagcgggccctaatgggactaccagccacattgacctatttccctcctcccacaaagc |
| | | gccaatgagctacaaggtttccgcggacggctgcaagcctgcgagcgtccgggtcatctccctcgcgagctggaagcccggaatactcgttacctgcaggcttgcgacaa |
| | | agctctcgccaccgaggaagccccgcaagaactcagctgcgatggactgggaaacatccctgtcgctgccgggctccggtcgttatgagctccagctccaccttgctccg |
| | | ggggcgagcattggaaaggtagaaggcttgccggacgatgccaccgaattcgaggagcagcgggagacaatcgaaccacggcaagttggggaatacgagtatctaata |
| | | gaggtcgaggctgatggcaagtaccagctggacatcgcctttactgaagccggcgagcaagttccgaaggtctgccgggtatacctgacctgcgaagaggcaaaggagg |
| | | aaggttgcaggagcgaattcgagcggctcatcaagctcaaccgacggcatctcgagaagttcgataccaaggctgttgtccatcttgaccggaacgcacgctcctccagcc |
| | | tgcagtcgtgggtgctggaggatcagaacgtatccaattccttcaggccactggtgatcgcggacgactatgcgtcccggtgggcccctcctgactgggacgccccgcac |
| | | ggccctgtactctcgaacgggcgtttccttcatgacccccgccccgaggccacgagcttccaacctcccaagggcttcatcgaggctcggcaggggatcgcccggtacat |
| | | acgtggtagcgacgaccaatcggggctccttgagtcagcgccgcttggtgcctggctatccgaagaccctgggttccgctcccttgtcgaggactaccttggagcgttcatg |
| | | tcttggctggacgccgacccgggtatcgcctgctggatcgacaccattgccgtctgctccctggagccggatggtcgtaccctgggaaggatcccagacgccatcatccttt |
| | | cccccctgcacccattgcgcctcgcatggcactgcttcgcccagaaagtactccgtgacgaggccgagggcgaagccccgtgcccggcagcaagcatcctcgatccgg |
| | | actgcgtccccgatctactgaccatctcgctgcaggcaccgggaggagtggatcaggtcgacttcctttccgtcgaatgcagctccgactactggtccgtgctttggaacgg |
| | | atcccggctgggacaaatacccgatcgcgctcgccgggccccgttcgacagtagcttcgggctggcagttggagggatatcgagcgggttcagccccgcccaggtctca |
| | | cgagcactcgacgacgtcaccgacctcctggcagccaagcctatcgtcagcctggtagtgtccagcgcaggtggcaccacggatgcatgcaacgaagggttggccacct |
| | | ggtgcaccaagcgattcggcaacggggaccatgacaccccgcggcacggtgtcgggccaaggattgtggaggtattcgataccaggcaggctggccggcccgaccag |
| | | gcgacgatcgccaacctctccgaggacacaggcaaccacgtccgctggtatgacaagcaaccaactgggtccaagccagacctgggcatcattgcccaactagattcgg |
| | | cccaacccgaatccaaggaggtcggaatgctttcgccgatgggaaccggcggactgatcaggcaccgcgtcaggcgccaactccaagcctccttcctaagtgaatcccg |
| | | gcagggcctgcagatgccaccctccggcgaaccgttcgcagataaggtttccgcatgcatgctcatgatggaaaggctcagggacggcaaggtcggcctgcagttctccc |
| | | ctaatgtccatgcagtgtccagcatgctcgaggaaaacagcgctgggttcgtcgctgtatcgtcgtcagcaatcgaccccgcctgcttcctcggaggctggatacaagggac |
| | | gtatctatgggactacgacctcccctcgtactcgcatcgcgcaggcgacacaagcggctactacctgttatcacaggtcaagcaggctgatcgcgatgcgctacggcgagt |
| | | cttgaagccccttccgggatgcgaggatctggacgatgatcaggtcgagcaaatcctcctcgaggttgcgcggagggggattcctacggtgcgaggcctctccggggac |
| | | gatacgggggcgacgggcgaccttggcctgttcctcgctgtccggctcctacaggatcagttccgtgtgacaggcaacaaggaaagcctgctgccggtgcttgccggatc |
| | | accggaggactcgacgatagcaataatcatccccgtcgaccccttccggggttacctttccgatcttgcccgctcccttggcaaggagcgcaaggatacctccctgtcgcgt |
| | | cccgatctgctggtagtgggcgtgcgcgcatgcagcgacaagatccacctgcaccttacgcccatagaggtcaagtgcaggcaaggagtagtcttcggtgcaggcgaatc |
| | | aaccgaggcactctcccaagccaaggccctgtcgtcattgcttcgtgccatcgaggaacgtgcaggtagttctctggcatggcgccttgccttccagcacctgttgctctcaat |
| | | ggttggctttggcctgcgagtctacagccagcatcaggcagtaggtgggcatgccggccgctgggctagctaccatgaacgtatcgctgcagccatactcagcccaaccc |
| | | cgccgatcagcatcgatgagaaggggcggctgatcgtggtggacgcgtcgctccagagcagcccgcatgatcgcgatggcgacaagtacacagagaccattgtcatttc |
| | | cagccgagatgccggtcgtatcatcgttgggaatgacgcacagtccttctatgatggcgtacgtgcaaaggtcgacgactgggggctgctaccctgccaggcaagtgcgg |
| | | ccggcaccccaatcgtgcagcccgacatcactcccccggacgatgtccagacgggcgaccccatagtagtcccagcagaagatatccccggggcatccaccagtctggt |
| | | cgatcagacatctaccggcgtagcggaaccaggggcaagccctgcccccccaactgacgagccagggacagggatcattctctctgttggcaagactgtggatggtttcg |
| | | agcctcgatcactatccctgaacatatccgacacccggctcaaccagttgaacattggtgtcgttggcgacctcgggacaggcaagacccagttcctcaaatcgttaatcctg |
| | | cagatatccagggcccgcgaggccaaccgcggaatcacgccaaggttcctgatcttcgactacaagcgcgactacagcagccaggactttgtcgaggccacgggcgcc |
| | | aaggtggtgaaaccctatcgcctgcccctgaatctcttcgacaccacggggatgggggagtcctccgcaccatggctggacaggtttcgcttcttcgccgacgtactcgaca |
| | | aggtgtattccggcatcggccccgtgcagcgggacaaacttaagggtgcagtccgcagcgcctacgaggtggctggtgggcaaggccgccagccaacgatctacgatat |
| | | ccatgccgagtaccgagagctgctcgcagggaagtcggactcgccgatggctatcatcgacgacctagtggacatggaggtcttcgcgcgctcaggggaaacgaagcc |
| | | gttcgacgagttcctggatggagtcgtggtgatatccctcgattccatggggcaggacgacaggagcaagaacctgctcgtcgccatcatgctgaatatgttctacgagaac |
| | | atgctacgcacgccgaagcgccccttccttggcacgtccccacagctccgggccatcgactcgtacctattggtggacgaagcggacaacatcatgcgctatgagttcgac |
| | | gtgctccgcaagttgctactgcagggccgcgagttcgggacgggcgtcatccttgcctcgcagtacctgcggcatttcaaggcaggggcaaccgactaccgggaaccatt |
| | | gctgacctggttcatccacaaggtacccaacgcaacacccgcggagcttggagtactcggcttcacctcggacctggcagagctatcagagcgagtgaagacccttccca |
| | | accaccactgtctctacaagtcattcgacgtggctggagaggtcatacggggactgcctttcttcgaactcaccaaccaagcctgaccaacgcccggcctgcgaatacagg |
| | | ccgggcaaggaggctcctaatgacagacttcctttctcccgcagaacgctcggacaggatgtcacgtatccggggcaaggacacgcagcccgagctagcattacgcaag |
| | | gtccttcaccggctcggactccgataccgattgcatggcgcggggctactaggcaagccagatctcgtgttcccgcgatacaggaccgtggtattcgtgcatgggtgcttct |
| | | ggcataggcacaagggatgcaatatcgccacgatccctaagagcaacacacccttttggctggagaaattcgaaaagaatgtcgtacgtgacgcgcgagtagcaacagat |
| | | ttgcaggccttgggatggacggtacttgtcgtatgggagtgtgaactgacatctgccaaaaaagcccagaagactggcgaacgcctatatgaggttatccgtagtcgtagcc |
| | | acggaaagtatcggtaatcgactgaagcagccctgcggcctgtagtggtctactgatcccggacaccgatttaggcgaaaatcctcgccgtgagagaggtgtccg (SEQ |
| | | ID NO: 408) |
| 44 | Dcm + | cgaacggagcaggtagatccgcgctaactgacttgcccaatctggctgcattcgtccaacgctaggcggcttcgcaggaaaagcgaaacggagggagattctacgcgca |
| | HerA + | cctttgtgcagacctgaggctccaccagacctgagagcccggcacgattgactgatcataggagtaaggccaagaagcgacttgatgcgcttgtaaggtaaattctcagcg |
| | Vsr | aatcgaagtaatgacaccgaaacacgtgcggtcgacaaccgtgtaagattgctgataaaaagagcaggacgtcacaagaaatgaacttggaagtagtgccggcgagccg |
| | | gactttcatcgacctcttctcgggatgcggaggtttgtcgctgggactttgccaggctggatggaaaggactcttcgccatcgagaaggccacggatgcgttcgagactttcc |
| | | gggagaacttccttggtgagaactcccgctttgcctttgattggcccagctggttggagcagcgcgcacactccatcgatgacgttttggcactgcgcggtctacatttgtcga |
| | | aaatgcggggtgaagtcgacctcatcgcgggtggtccgccatgtcaaggattctcgttcgcgggcaagcgaaacgcgaaggatccccgtaaccagctctcccagcggta |
| | | cgtcgatttcgtcgagcgactccagccgaagtccctagttctggagaacgttcccggcatgaacgtcgcccataagtatgagcacgggaagagtcgcaagacttactacga |
| | | aaagcttctgcattcgctttcaatagccggctacgtggtgtcggggcgtgtcttggacgcggctgacttcggcgtcccgcagcgccgcactcgactaattgccgttgggattc |
| | | ggtcggatatcgcggataagcttgcatgcgcggctagctcgactcccgcagacgtgctcgagggcatcttcgatgcaatcaatcaggcaggcaagcgtcagctcgtccgat |
| | | atggccagggcgcccatgtcacggttcgggacgcgatctctgatctcgcgattgggccggccgatcacgagaacaccgaagactacgtgggaagcgagcgatgtgcag |
| | | gctacaggcaggtcaggtaccaggggccgaacacgccttaccagatcgccatggcttctggggtcaccccatccgaaatggacagcatgcgacttgcccgtcatcgtcct |
| | | gatgtagaaaagcgcttcaaggcgatccttgaaacttgcccgcgaggggtcaacttgagcgccgagttgagggcgcagcatagaatgctgaagcataggacggtgccga |
| | | tgcatcccgaaaagccggcgccaaccctgactaccctgccggatgacgtcctgcactaccgagacccgaggatcctgacggtccgggagtacgcccgaattcagtctttc |
| | | ccggactggttccgtttcaagggcaaatacaccacgggcggggcgtcccgtcgtcatgagtgcccgcggtacacgcaggttggcaatgcggtcccgccgctgctcgggc |
| | | aggccattggctcaggattaatggcgtgcctctctttgagttcaacgcgagtgataagggccagtgcgcccagtctcgcgatggccgagaaaaaggcttttgccgtatagca |
| | | attagtcagctgcaagaatcgaacaggtggatagacgatgacgaaataccccgatggattgcttgattggtcgggcaatcgggctggaggagtcaagaaactcttctacgg |
| | | cggcagcggccgccccgtcgggaaggtgatagagactcctctactcacccgtctctgggaatggtcggatagcgtcgtccagttcgagccgggcattccgcgggcggtgt |
| | | tgctgttgggagggccgggaaacggcaagacagaggcaattgagcagacgcttcgccgaattgactcaaggcttgcgctgagcggagcgctcatcgacaagcttgcgg |
| | | ctgtcttcgagtccaaggatggagtccccccaggacgccttgtggaggtggatcttggggcgctticaggggggcgctcgagcgggacaatctcgattgtccaagacgcct |
| | | cggaggggaatccgggctctcctgatcttccggcgcaattgctctgcaacgacctagcaggactcgtcgaagacaacgtgtcaaagcgcatctatttagcgtgcataaatcg |
| | | cggcgtcctagatgatgccctgatacttgcgacggaaagaggtgacacagaaattggtgctttgctgaagcaaatcatccggtcggtgtcgatggcggcccatggcgtctca |
| | | tgctggcctctgcagggatatccgggcatcgcagtctggccaatggatgtggagaccttggtcgcaggcgtccagggtcaaccttcacccgcggagcaggttcttcatattg |
| | | cggccaatgccgaccattggcctgatttcggggcatgcgaagcgggtcagtattgcccgttttgcacaagtcgcaggctcctttccggcgagccccatgcgggatctctcgc |
| | | caagctgctccgatggtatgagctggcgagcggaaagcgctggaacttcagggacctgttttcccttgtcgcccacctgttggctggaacccctagcaatgccgatgcgtcc |
| | | ggttattcgccctgcaaatgggcggcaaaacaactgaatccccccggcggcgacccgcgcaaggccgatgtactccgaaagcgcggagtctttcggttgctggcttccca |
| | | ataccaacacgcgctctttggcgactggccaatcgagcatgcgtcgggtctccgaagagacatcgccgacctagggcttggtgatttcccggcgcttgtggctatccagca |
| | | gttcctggcgctggataagcggcgggagtcgacggcaaccctccgtgcccagctctccggcatgtcatccgtattggatccagcaaaggcaagccccaccttcgaggtta |
| | | gggtaagcgctaatactgttattcgttacgaagacttggataggcggttcagcctgtccatccaaggaggcagagagtacctccaagaatatcagtgcctctcggagatcga |
| | | gatttcagcactcaaggtccttgaggaggccgacaataagttgtctgatcacttagtcaggcgatctcggccggcgacagcaattcgagtccaggcgcttctgagggccatc |
| | | gcgtgcaggctggcaaggaggtcgattggcgtcaggtgttgtgtcacaaaggatgccgacgtcctcgaggagttccaccgcgtcaccaatggcgattcgtcggcgctgca |
| | | gcaggcgatcaggcaggtcgaggcacttctcaacgtcaatcgccggttcgttgtttgtctcaacaacacctttggtgagccgctgcctcccccagagcggcgcgcgatgctt |
| | | accacggacattcagcgcgttaagccggtgcccgccttggagggtgttgagcggccgagatcgccgatgcccttcctgagggtcggcgcacaaggcaacgccaggccc |
| | | atagccctgaccttcgatctcttcaaggcgacgaaatcccttaggcgtggcatggtcgcgtcgtcacttccgaggtcggtggtcgcgcttctcgatacgacccgagctggtct |
| | | tgcgggagcgatcgtgcgagacgaagacgctctggaaggtgcggagatccggatcggaatcagggatgaggtcatagtgcggacctttggaagtttcgtcatccgccag |
| | | gagggtgcttgatgtccatgcaggagtttctcgcttcaccatggaagaaagaagcctcgcaccgagccttcaacgaatcctcttttggtatgaggtctgccccggagttcgca |
| | | actggcgaggtcgtcctgtcttcgctctaccgcgccgtcggctttgacggggtttccgaggagaaagtgccctcgcttggcaatgatttcaggaaggcgctggacaaggaa |
| | | cgcagaaagcagaacgcagctggtggtctgagcccagaagcctggcgcacggtcgtggatcgtgtcgtgcaaagtcctaaggttgcgcagcaatcctccaagcgattcct |
| | | atcgctgtccccggtcgttcccgacgcggccatctactcgggcgccgcgcgccttggaggaaactcctggaacccggggcggctgatcaagcaaatggtcggaatcggg |
| | | tcggagaccatggagggcgcggaaacgctttggggcgaactctacgatgctttgtccgtgacggaagcggatgatgtctgggcaagatggctccaaacagaatttagtccc |
| | | aggcgcccagagcaaatagcgtgggccccaagaccgatggatcaaccagatttgcttccgcaatccgatagacggggagtttcctatcccgctcggcagttcgtggtgga |
| | | cctgcgaggaatcttggatgcgaagtccgccatgacgcggcggcagtggatcacactgctcgaggcgctacttcgaattggatcggtcagccatgtgctgtggctgtgcga |
| | | cgtcaatgaccgcttgtggcgtgcgatgcgtgcggcgctcgagggcgaggcgagtggcgtgcccgccgatgccgccgccataagaaccgacattctggccgtcaggcg |
| | | gcggacgctctcgttcgggaatcccgctgtcccagcgattcgggacctggcctctcgatacctatccgcacgcctgggaatcaactgtgtcctttggacgctggacgaactt |
| | | ggcgtgggctcaagtcgactttgttcgtccgaagaaatccttgacttcatcaagagcgttcaggccaacgcaggggggctcaaggcccgtggcgtcatggatgccttccatt |
| | | ccctgcaagacaaggaagtcaggaccattggctgtaagaaaggagtcggagcaaaccttctggaattcagccagtacacgcttggacagaggcagacgatggaccagg |
| | | cactccgcgggtacgaccagagctatttcctcaggaagaacggggatgccaggaacgcgccatgggttctatctctagggcccgctgccgtacttgcgatggtccactcgt |
| | | gcctacatgcggtggatggaccgcgatcgatacaaaggctttcatcccatctcgggagctacggcatcgagtttgatctccacggcgtcaacgatagcgtccttggaaagca |
| | | actccgaatgctcggactcgtactggatagcccggatgccgagagcggtatgctccttgtgcccccgttcgtagcctgaggaaggaggcaatgatgagcacgctagccaa |
| | | gggaattgcaagctgggtcgaaaaagccatggcgcgtgagatcgcgacgctggtggccgggaatatggagtgtcgcgcagtcttctgcggcccgccaaagcacatcctg |
| | | aatcaagtatttgggcatcttatccacggtcgatcgctgatcgaagcgacaagggccgatggtcaggcggttcagtatcccgtgatccttcaggtcgaccgcctccctacag |
| | | ggtttcccatcggctccgccacacagtcgggatgccttcagttccatggactcgctgccgtcaggaacgacaggaatggtgttttcctagttcttgtcgagcccggtgctcaa |
| | | gcgagcgatacgcatgaatcaactcgaacttcgcttggactcgagccatcggtaaacgagggcggtgcctcgatcattgcctggtggtctgatccattcattcagtcgcttgtt |
| | | gattctgccctctcagaactctccggtcgcgacgccgcggctgccaaggatctactaaaggaggcgatgatcgccgccgacgcggcagatcagcacgaagtagcgaga |
| | | gttggagcctggcgcgtcatcgaacggttgtgggagctaaaagaacgcggcttgtctcttgaccaactcgttagcttggccgccggattcccgccctctagcgacggaagta |
| | | ttgaaccgagatccaagaccgccatcctttcagccatcgtggacaggatcgaagccgagaacttcggtggcttactgtcgtcccttctgcaaaaagccagggacgatatcga |
| | | aaaagaacacatcaccgcgtgcctctcgaatatgaggggcaggtgcgatgtggttactgcggttcggcgatgtgcgccatatgcgtacatgccttcggacgccatcgctgg |
| | | cgaagtctggtggaagtcgctcactgtcgagcgctgggaagagttgctcgatgatggcgctctacccgatgcgggcggcgacatcattattcagtgtgccaatccgatgattt |
| | | cgcaccttaagggcatggttcccgtcgtcaagggatccgtgcaacttaggatcgaggttccagagaagtacgtgggcaggcggttggaggttatccgcgaggtcccgggt |
| | | gcgaaggcggcgacgaaggtttggacagttgacgcggaacgcatgatccacgtcgaggacgacgagatccccccccacaagagtccgatgaagtactcggcaagcctc |
| | | gaaggatcagccggaaagaaggcgagcgttcgaattgtctcaatggatggctggctccctggggtggttgcctctgcgacgacggcgacaaaaggttccctcccgaaac |
| | | gctcaaaagcagcgaagttagaggcgtcgctgtctctctccgggcaggggaggcactaccttgacatctacttaaggccgggcgtcgagctcgcgtcaatgctcgccacc |
| | | ggtagtgacgaggaaggaaatccagacccgtccatcacggcgccaatcggcatggtcgcggagggcgagttcggggtcgaaatcgaaatcgaaggggaatgcttcttc |
| | | gacatcacgctcagggttccggaggttgcggatgatcaggtcatccggatcgaattgtcggcggagcaatcaagcccggaagagtgctcaagccacttcgaattgcagctc |
| | | cttaagaactctagcggtcggaagcccagcgcggtccacgttaatgctcagctaagaagtgcgcagcttcaaggttggatgctggagcaggggcgcgctggtcgctcctat |
| | | tatcccttcgttatggccgcggactatgccgccgactggcacaggcgggactggactggcgcagatgacacgatcttctcgaaggctagcttcctgtgcgatccccggccc |
| | | tcgccggaagaaatggcgccgccgcaggctttcatagatgccagagccgcactggccgccaggatcaggggtggtgacggaaatggcttggtcgaaggtgtgccgctc |
| | | ggtgagtggatggcaacggatcccgatttcgccggggaaatagacgtctacttgaaatcctacatgcactggcttgcgagcgatccagatggggcggtttggtgtgacgta |
| | | gggttggtcgcgcggctcgagcctaacggacttaccttggtgcaagagccggatgcggtgatagttagcccgatgcatccggtaagacttgcttggcactgtgtggcccag |
| | | cgagccatgttccttgccgcacgaaagagaccttgtccagccgccagcatcctcgatccggattgtgtgcccgatgcgatcactctcccactgagaaacgccatgggtggc |
| | | aagaccaacgccacttttttctcggtcgaatgcagttcggactactggtcgattctttggaacgcggggcgcttggaagccctttcttcacatggggcgacagccccgcttgac |
| | | cgggagtttggcctactcgtcggcggaatctccggtgggtttagtgtttcgcaggtgcacaaagcgctcgaggacatctgttcgatgctggtggcgaagccggtcgtcggc |
| | | gtcctggtgtccagtaccgcgagccagaacaatgcgtgcaatgaaggtctgctttcctggggcaggaagtacttcggcggcggggatagggcggcaggcttggacgcct |
| | | gggtcggggccagcgaggtcaggatctacgacgacagaccggaagatgcccggcctgatgatgcggagatttcaaatctggccgaggatacggcgaacgccgtgcact |
| | | ggtattccggcacggtggccggcgaggctcccgatctagcgatcatcgcccagcttgagacctccaatcccggtgcactcccaaccaaactaaattctccgttgggcttcgg |
| | | tgggctcgtgaggacccgaattcgggagccttccagcatggcggggggtcaactgctccgtgagtcgcgcatgtctggtcccgcggcgcccactggcgacgggctggc |
| | | cgacgctgtagcaagtgccatctcgtcgctcgagaacatctcggagcaacgccttggttacgtattcgcccctagcattcatgtgatcaagggggcgctggagagcgcgga |
| | | atttgccgcagtttcctcttcgagcgttgacccggcctgctttctcggaagttggttggagggcacctatctttgggactacgagctcccgtcgtactcaggtcgtgccggaga |
| | | cagcaatggctactacttgttgtcacggatcaaggatctcgacctcgaaaccctgagaagcgtggtcaagaggttccccggttgcgaggagatgccggaagccgtgcttgc |
| | | tggaatagtcgaggaggtcgcacggcgtggtattccaaccgtcaggggcctcgccgcaggtgattctggcgcgacgggtgatttggggctactcgtggccacgaggctg |
| | | cttcaggatagcttccgggcggccgaatcaggcgctggtctcctgacgccttggcgcagggagggagacatcgaagagcttgctctcgtcattccggtggatccattccag |
| | | ggctatcttgacgatctcgcgaaggcgctaaagcgccctacgctccaccgcccagacctattggtcgcgacggtgcgaatcagtgacctgggagttcaggtccgactgact |
| | | cccatcgaggtcaagaaccggggtgctggagcggcgatgccgcaatccgatcgagaagccgcgcttgcccaggcacgctcgctggcatccctgctagatgcaatgctg |
| | | gcaacgtattctgaggatcaagagatggttctctggcggattgcgcaccagaacctcttgacctcgatgatcgggtacgcattccgtgtttacagccaacgtctggcagccca |
| | | aggcaagtcgggagactggtcgcgcctgcacgcacgagtcatggaagcaatcctgagctcccaggccgatgtgcgggtggattcgagaggccgcctgatcgtgatcgat |
| | | ggctctagccaaagtggtccgagggatacagatggagatggtttccacgagactatcgagctctcgcacaaggatgctgcgcttttcatccgtggcgagcacgatgcgctct |
| | | gcacggccatgaagcagaagctaggtggctgggaaatgttccctgaagggagggatgccggactctccaatcaatcgccgcccgtggcccatgagactgcgcccttggt |
| | | ggatggcggcgttgaggtgccgtcccttcacgcgctccaagcaacggcggggcccgagggcagctcgctgccgtcttcgggagtcgaagccatgggcgcgtcgcagc |
| | | cggcctccccgggagccatcgacgtggatggcggcatggcccagtccgggctgatcattcgggtcggtgaaacgatcgatgggtttgagagccaaattcggcggctgaa |
| | | tcttggcaacacggccctgaaccaaatgaacatgggagtcgtcggcgatctggggaccggtaagacgcagctgctccagtctctggtttaccagatagccaaggggaaag |
| | | atggaaatagaggtattgagccgagcgtcctcatcttcgactacaaaaaggattactcttcgaaggagttcgttgatgcggtagctgccagggtcattagccctcatcaccttc |
| | | ctctcaacttgttcgatgtttcaactgcatcgcagtccatcaatccaaagctcgagcgctacaagttcttctccgacgttctggacaagatctattcagggatcgggccgaagca |
| | | gcgagaccgccttaagaactccgtcaaggacgcatatgtgcaagccgccgaagggcagtatccaacgatttacgacgtccatcgaaattacgtagaagcacttgatggag |
| | | gcgcggactccctgtcgggaatcctaggcgacctcgtagacatggagctcttcacgccggatccaagtgtcgttgtttcgtcggccgaattcctgcgcggagtggtcgtgat |
| | | atcgctaaatgaacttggttccgatgaccggaccaagaacatgctcgtggccatcatgctcaacgtcttctacgagcacatgctgcggatacagaagcggcctttccttgggg |
| | | agaaccgcaatatgcgtgttgtcgactccatgctgctcgttgacgaggccgacaacatcatgaagtatgaattcgacgtcctgcgtcgggtcctcctgcagggacgtgagttt |
| | | ggcgtcggggtgatcctcgcttcgcagtacttgagtcacttcaaggcaggtgcgacggactaccgggagcctttgctttcctggttcatacacaaggtcccgaacgttcgtcc |
| | | gcaggagctttcggcgcttggctttagtgatgcggtgggattgccgcaattggcggagcgtatccgtagccttggcgtccatgaatgtctctacaagactcatgacgtgcaag |
| | | gtgagttcgtccgcggcgcgcccttctacagacggggtgagtgggccaaggaatgacttttcgtcgtgtcgatttatcgcctagttacgcttttggtcttaagttgcgttcctaag |
| | | agaggtgggctgtgtccgacaatgcgtattacgtttatgcgctgaaagatccacggatggcgcccgcccagccgttctacataggtaaaggaaccgggacgcgctcccatg |
| | | accatcttgtaaggccagacgattcaaagaagggaagcaagatctccgagatcatggcctcagggcgtcaggtgctggtaacccggctcgtggacgggctcacagaaga |
| | | gcaagcgttgagaattgaggccgagcttattgccgcttttggcaccctcgatactggggggatgctcctgaattccgttctgccaagcgggttggtaaacaagagccgtagct |
| | | cgctggttgtcccgtctggcgtaagggagaaggctcagattggtctggcccttctaaaggacgccgttctggagctggccaaggcgaatccgactggtatctcgaactccg |
| | | atgctgcgagcatgctcggcctgcgtagcgactacggcggaggatcgaaggactatctgtcgtacagcctcctcgggctgctcatgcgggagggaaagctcgctcgggtt |
| | | gccggcactaagcggcacgttgctcaagtgagctagctgtggggttccggatcgggctggcccgctcggcgctgcgctacgaagctcgcttgcctgccaaggatgctgc |
| | | ggtcatcgaacgcatgaagcactacgccgcgctgtatccgcggttttgctatcgccggatccatatctatctggagcgcgagggcttccatctcggctgggaccggatgtt |
| | | (SEQ ID NO: 409) |
| 45 | RecQ | atttgcctgagacttatttcccgtggcgcttagctagctaagagtgggcatcgtgagcaccattgatgatatgaaatgacggtatagcaatttaaccgtctggatttcaccagaa |
| | | attagtgattcaataggaaattaaatacgttttatatttcaatgtgtatcaaaatcattcctgaaatttcctggtgctatatttgatgaaaacggataaacattctgttgattttaataaaa |
| | | ttctgtctttcgatttagagcttacgcgtgatgaaaagttaaggcatatgggggccgtgctggcggaacgcacgttgagtttgaagataaatcaggatgaagcgattcatcaatt |
| | | ggatgaaatggcaggcgatgcagatttaatcctcggtcataacatactggatcatgatttaccctggattgccaaacaacgcgtacgtgctcaaatattattagataaaccaatc |
| | | attgataccctttatttatcaccgctagcttttcccgcaaatccataccatcggctgattaaagactataaactggtaagagatagcattaacgatccagtgaatgacgctaaatta |
| | | tcgcttcaggtattcaccgagcaaatatgtgcgctgcaagaaaagccgctggctcagttgcagctatatcagtatctttttgagcacggcgttgccagccatttcagtacacgtg |
| | | ggatggccagcattttttccgcactgacgggtcaggcgtccatatccgccgtagttttacctacgctagttaaatcggttgctcagaataaagcatgccctaaccagcttaatcg |
| | | ggttattggcgatgctcttaaacagcctttgcgcttactaccattggcttttgcctgtgcctggctccccgtatcgggagggaattctgttttaccgccctggatatggcgccgtttt |
| | | cccgtcaccgctgatatcatccgcgaactgcgtgagcaaaaatgccagtctgaaacttgccgctactgctgtgaaaaccatgatgctcgtcggcatttacagaaaattttcgag |
| | | ctgaacgattttcgtaaacttcctgatggctcgccgttacagcgcaatatcgttgagtacggattagctagtcgttcactgcttgggatattaccgactagcggagggaagtcttt |
| | | atgttatcaacttcctgcgattgtcaggaatctgcgaaatggttctttaaccattgttatttcgcctttacaagcgctgatgaaagatcaagtggataatttacgtcataaggcaggt |
| | | attaaaggcgttgaggccatttcagggatgctaactttacctgagcgcggcgctattcttgagcaggtccgtaagggggatattgcgattctttacctctctcctgagcaattac |
| | | gtaaccgcgcggtaaaacaagctatcaagcaacgtcagattagtggatgggtttttgatgaggctcactgtttatcaaagtggggccatgattttcgtcctgactatctgtattgt |
| | | ggcaaggttattgaatctttggcgcaggagcagtctgtgcagattcctccggtattttgctataccgcaacggcgaagttggatgtgattaatgatatttgtcggtattttgacaaa |
| | | aaattatcgcacccattagctcgtttttcagggggagtagaaagaattaatcttcactatgaaatcattgcaagtaatggcttgagcaaaattagtcagattttgaatttgctcgata |
| | | aatttttttctaatgatgatgaaggtgcatgcattatctattgcgcgacccgccgttcggtagatgaaatcagcgatgtgttgacccaacagcaacctttaccggttgctcgttttta |
| | | tgcccggcttgaaaatagtgaaaagaaagaaatccttgaagggtttattgctaaccgttatcgagttatttgtgctactaatgcctttggcatgggaatagacaaagaaaatgtac |
| | | gtttagtaatacatgcggagatccccggttctctggaaaattatctccaggaggcagggcgtgctgggcgggatacgctggacgcgcattgtgtgctattatttgatgagcag |
| | | gacattgaaaaacagtttcgccttcaggctattagtgaagtaagctttaaagatatttatgcaatatttaagggaatcaaaaagaaagttaatgaaaataatgaagtcgttgccac |
| | | aagtattgagctaattaatcatcctatggttaaaaccagtttctctatcgatgataacaatgcggatactaaagttaaaacggggatagcgtggctggaacgtgttggttatgtgg |
| | | agcgacttgataatataactcaggtttttcagggaaaagtggcctttccttctctggaagaagcgcaaagtaagatggcagcgctgcacttgaatcctgcggcgatggttctct |
| | | ggaatgctgttttacaggcgctattaaatgctaatgacgatgacggacttagtgccgacagcattgctgatgaggttgcccaatttcttccgcataaagaaaataatacgtcagg |
| | | aattgaagcaaaagatgttatgcgcgtattgacacagatggctgatgttggcctggtcaccaggggaatgctgctgaccgtacgtatgcgccccaaagggaaagataatgc |
| | | gaggatcacaactgagttaattcacaatattgaaatcgccatgttagggctgctgcgcgaagctcatcctgatattgaactggggatgccatggcctctccagattgcggttat |
| | | gaatcaagagattattcagcaaggctatgatagaagtaataccacgttactacaaaatatattatttagctggtctcaggatgctcgagcaaacggtcataaagggcttattgatt |
| | | ttcgttatggtacaaggaacagctaccagattattatgtatcgtgactgggcatatatcgaaagagccattttacaacgtcatcgtgtgacaagctccgtactgaattttatttatca |
| | | attggcattggatagtgatgaaagcagtatcaaaaaagtgatgctttctttctcactggaacaggttatcgattatttaagaaaagatgttgatattattccaatgatccaacagag |
| | | acaggggggggatgagcagcagtggctgatggctggtgcagaacgtgctctactttatcttcatgaacaacatgccattgtgctgcaaaatgggctggctgttttccggaca |
| | | gcgatgagcttgaaattgcaggctgaaaaatcgcaacggtatgtcaaagctgattatgaaccactggctctccattatcagcaaaagacgcttcagatccatgtgatgaatga |
| | | atacgccaggcttggtcttgaaaaacctaactatgcccaacggctcgtacaggattactttgctatggatgccgagtcatttgttccactttattttaaagggcggcgaaaaattct |
| | | cgatctggcaaccagcgaaagctcatggaaacgcattgttgaaaatttgcataatcccgatcaggagcaaattgtgcaggcgagccttgaacaaaatacgttagttcttgccg |
| | | gaccaggctcagggaaaagtaaagttattatccatcgatgcgcctatcttttacgcgtgaagcaggtcgacccgcgtaaaatcctgttgctctgctataaccgtaacgcagcg |
| | | atttccttaagacgcagattgaagtcgttgcttggtaaagatggcgccagcataatggtacaaaccttccacggattagcattgagccttacgggataccagattgagcggaa |
| | | agataatgacgaaatcgattttgataacctgctctggaaagcaatagctttactcaaaggcgatgaaacgcagctcgggttagaagttgaagaacaacgtgaatacctcctcg |
| | | gcgggcttgagtatttactagtggatgaatatcaggatattgatgagccacagtatcagctgattgccgcgctggcaggtaaaaatgaaagtgaagatgatgctcgtcttaatct |
| | | catggcggtgggtgatgacgatcaatctatttatggtttccgtgatgccagcgtgcgatttattcgtttgtttgaaagcgattactccgcccgtactcattttttaacgtggaattacc |
| | | gctctacggccaatattattgcatgttcaaattatcttatcagtcataatcaggggagaatgaaatgcgagcatccgatcgtaatcgatcgcgctcgccagatgcttccgccagg |
| | | cggagagtggagcgcacttgaaccttcggaaggcaaagttgttatccagcattgtaccggcgcggctcagcaggcggcagaagtcgtgcgccaaattcagtatattcaacg |
| | | gctgcagccggaatgccctcttgagaaaattgcggttattgcacgcaatgggctcgacaaaaaggagcttatttgggtccgttcagcccttgcggatgcaggtattccttgcc |
| | | gctttgcgctggagaaagattatggtttccccattcgccactgtcgggagatcgccaattatctgctatggctacgagaaagagcgctcgagtcgctgacgccagcagagct |
| | | gtgtcagcaactaccggggcgagaccaggcgaaccgttggcacgatattatttatgaattaattgagcaatgggagctaagccagggaggcgagccattacctgccgctta |
| | | ttttgaacatttcatactggaatatttacatgcccagcacagccaggttcgctttggcctgggggttttgctgagcaccgtacatggcgtaaaaggtgaagagtttgagcatgtc |
| | | attatattagatggaggttggcgtagttcgcactctctgcaacctgaaaataacgaagaagaacgaaggctcttttatgttggcatgacgcgagcgatatcccgacttgttattat |
| | | gcatgatgatcgtgcgccaaatccctatatcgaacagttagatccagcggtcatcagccatactgctgcacaagccgttgcgcctgggatcttacgtcgtttctcgatcatcgg |
| | | attgcgccagctctatatcagttttgcaggtggacatccggctggtcatcccattcattcgttacttaccgatatgcaggttggggatagcgtccaactggtctctgtcgggaata |
| | | ccatcaaggtgaatgctaatcaatcggcaattgcgcagctttcaagtgccggaaagagccagtggcaattttctctttccgggatccgcaaaattgaagtgcttgccatgctac |
| | | agcgcagcaaaacactaacagcagaggattatcaagttgcggtgaaagtggacaattggtatgtaccgatattattggttgaaacccgtgaagaagccgcttatgacaatatt |
| | | acttgaagcagaatac (SEQ ID NO: 410) |
| 46 | Histidine | aactcacccgctctgaacgagccccttgaaacacaagacaccgtttttcccttaccataagggataggcaaacgactgtgtttatgactaccagcagagacaaaaccatcga |
| | kinase + | agtgctcggccacccatttgcgcctctaggttgctacgagactgcagaggatccatgtagcagattacctcggccatgaagctgctaacggaagcgaagccatagaccgta |
| | phospho- | ggcgatacacgtacgtatggctttccggaagggcgatcctagtcaactgtctgatgtccgccaaatctttctcaatactggtcattcaccttttccttgaccggctgtcaggccca |
| | ribosyl- | acgtgcattcagatcgtcgcctaaatttgttgcatcacgtagagtctgccgcgtgctcgcccctatgccagactagtctgatgtggcggatgagataggtcacgacggtggtg |
| | trans- | gctcggtagagtcggcatcgccgagtcaacgatggaacgtaaggggcgtgaatgcaaatcagccgtaagctcaacctttatgagatcgaggatctctaccagtcgcttggt |
| | ferase | acggattccaatctcaggcttcctatcagcatgagccacggcggggggttgggcgtggatgcttcgctggcccagttcatcgtcacctgggcacgtgcttgcgaaaaaacc |
| | | gtccttcacctatatgcccccgctggcgacgacgccatgacgcaaatcacgcagttggcgcagagtgcttctgggttcttcgcgctgatcatgtgcagtgaagtccacgctca |
| | | gaatcatcaactgatcgatcggcgggaagcgcttctggcgatcaggccccttgtcgatgcgatgttcgcaggcgaccttcgtaacacctccaacatccgaggcgcccgtcc |
| | | aacggccatcaatctgttctgcgtgaacaacgcaaagcgtgagttcatcaagccgttttacttcgatcacgccgtgccgaaagtccagccgagatcttggttctcgactctcttg |
| | | gagacgtcatcgaagctgatgaatgctcgcagtggacaaggggcactgcttaggtcaggtctcccggcattgggcagcgtgctttgggagttgatctccaacgctgaccag |
| | | cacgctgtcactgatgtaggcgggaacaagtacaagaaggcgctgcgtggcacctccatcaaactcaaccgaatgagtcgtcaggatgcgctgatgtattcagaccaaga |
| | | gccggagttggcgcgctttatcctgaagcatttcctgagagctgaggtactggacttcctggaagtctcggtcatcgacagcggtcctggactggcacggcggtggctgac |
| | | ggcgaaggaggggcggccagtagaaagcctggaggagctgagtcttgaggctgagcttgaggccacgctcgattgcttcaaaaagcacattacatccaagccgcagtct |
| | | ccgaactcgggtatggggctgcataacgctgttcaagcactcaacaagctcaaggcgttcgtacgcgttcggacgggtcggctttcactgcatcaggcttttcagggaagtg |
| | | atgagattatggagttcgatccgtcgattcgatacggtggccgtgtgttggccgctgtggaaggcactgtcttcaccatctgcattccggtgagctgacatgttcgatctcatgg |
| | | attttgaagtcgagttgcgtcagtcaggtaagccggttcatgtggtggttttcttcactggccctgatctcctcacagacacgcaagcggctcacgctctacagcaccaattgtc |
| | | gggttacgtcatgcctgacctagtggtgtttctgatgcctggttacaccttggatgaattccgagcacaccaggcaaatgctacatcgcccctgatggcggagctaagccgta |
| | | aaggcccaggctcgcctcgcacctacgcgagtgcgttctatgacgtgaatggtgccattaccgagtacgtcaatatctctggccctgaggagcagttcgaggaactcatcaa |
| | | gcacaactctaacgctatcgcgaggactggcctgacccacctcgtcgaacgctccaacgtgctgaagaaggcgcctgcaggcttcttctactcaaagccctcttctcgggct |
| | | tcgaactatttcattcgggcggaagacctgctctctgagaccttgcatgcccactacctggcgtttgcatgcctatctctcatcagtaaggcaacggaagatgggatggggac |
| | | gcccgataccctgtatctggacacaatcgcattgctgcctctggcgctgtccatgcaggtgtacctcatgcgatttgagcagccgggctttgcgaatatccggtcattccattcg |
| | | cacgaaggcctaatcaagggtgggcctttgcccaaggcagtttccgccctgtgtctcatttccgcatcgacccagtgcggcctcgcgcagcaatgggtgaaggtaaacagt |
| | | gctccgccgacgcgcgtggccaccattctttcatttgagcgctcatcggactcctgctccgtcttgcacacactgaagcagcccgaagactttgaaatgttgggggagggtg |
| | | aagcgagcgggattcgtctaattcggatccatggcgagcggttcgttgctgagcacagtgaaaccaagctgctgaacatcggcactgatcatgcgccgcccctgctgcaat |
| | | ccaagttctactcgttcatgggggccaacctgttcagctgcttcacccatgaccggccaggactgaggcctcggacagtgcatgtcgataaagataacctggtggctgccag |
| | | cgatttcggtgaatggttcgacagggtactgcttgaggaagctgtcgcgtcgacccgttggatcatccacgatgacgacgctgccagtgcggccctggccgatcgagcgat |
| | | cgcttacttagggatgtgtggcgtcaaggtcggtaacaaggtctccttcgatgacttcgatgccaacacgaattttgacgggtctgtcatcgtcattgccgctgctgccgaacgt |
| | | ggctcacgcctgcagagtgtgagccgacgcctgcgtaccgctcagcaatcgggtaccaggctttacattacgggggcactcttcgggcgcagctatcaactgatgaaggat |
| | | ctgcagagcaacctgacgcaacctgccaaggatcacagccggtatgttttcaagacgtacatggagatcccggcagcggagcttgcctgcacgagtcattgggccgaaga |
| | | gcagcggctgctcatctccttgcattcatttgcggaaactttctcgccagcgattacgcagcgcatggaagtatttgatcgcgcctctactggggggcttggtctgaacccatttt |
| | | ggccgagcagtcacaccgggcagccgatgacacttagccgaggctttgcgtttgtcgacggtacgaaggatgtgaggggcgcgacgtcaacggatatttacctaaccatc |
| | | ttgtggattctgcagaatgcccggtacagcggtaaggtgcagaacgccaagcggcttgagtccggtgagcttcagcaggtgctcctatcgccggatgtgttctcgcgcttcg |
| | | acgatggcgttatccaggccgcattcttgcgcgcagcggtgccggcggagcttgactacagggctcatgaaacccacagcctggccatatcggacatcattcagcgcatc |
| | | gccgcagggtacggacatgaacgtggtgaagccgccatggagtttgtcatggccttggctatcgggaagatacgactgcacaaggatgtcgataaccggctgcggagtaa |
| | | cttgatcaatatcttgacgccgcacgttcaggagatccgttatctgctggatccgaattacgaatcaccgttgtgatcaatttccgctaacccgttgcatgcgaggtatccagtta |
| | | ccggcaactcagctcatggctgagctgaaccctggttgctcttctagtttcgatggcttgccgattgccgggatcacccacctgcgtcggttctgcgacgaaggtctaagggc |
| | | agggtggtggcacctggcttgctcattccgtttgacctcgccaccat (SEQ ID NO: 411) |
| 47 | PH- | cgctcagtccggttggtggttttggttggtttggcgattgctcagatcgcacaatccgggctgagttccctttcagtgatctactattccgcgcagctatttagtggatataatcac |
| | TerB- | gctttgaaaaaaaaacgggtcaattactcttcgccccacagcaacgaataaggagaaatttgtgagtaacgtcaacactttccttaaggaaaatttatcttcagtaagtaagaat |
| | DUF726 + | gtttttgtggctcctggcatccctgaaaaaaaactgaataatgtcgctaaagcatttaatgttgtggataacttgaatactgtgctagccatttatgacaatacggtatttggtagcg |
| | TM | caaaagatggcatcgtttttaccggtgaaaaactggtcataaaagaagcttttgaaagtccttatgacttgttctacagcaatattgaagcagtagaatatatagaagatgtcacg |
| | | gtaaatgataaaggcaaggagaagcgaacagagtctgtttccctcaaactaaaaaatggcgaggtaaaacgaatcaaaggcttgatggagtgcaactataagaagttgagc |
| | | gacattcttaagcataccatcagtgactttgatgagttcaaagaagaagatcagctcatcactcttgccgaaatgtcagaagctctcaaagtggcttatgtcaaaatcattgtgaa |
| | | catggcgttctcagatgatggtcaggttgataaaaaagaatttgccgaaattctcttgttgatgacccgacttgagttaacgactgaatcccggtttacactgcgtagttatgtcg |
| | | gttcagaatccagtctgataccggttgaagaattaattgcgatcattgaccgggaatgtgtcccaagccataacaaatcaataaaagtctctcttgttaaagacctgattagcattt |
| | | tcatgagtgttaatgaaggtgaatataaaaaattcccgtttcttcagcaagtgcaacctttgctgggcgtaactgacgaagaaatagaactcgcagtaatggctattcagcaaga |
| | | ttttaagatgttacgggaagatttttccgatgatgcgctgaaacgcagtatgaaagaacttacggcaaaagcaggtgcggtaggcgtgccactcgctgctgtctatctctctgg |
| | | ctctgtcatcggtatgtccgcagcgggcatcacttctgggcttgcaacacttggacttggtggcgtgctgggtttttcaagtatggcaacaggtatcggtgttgcggtgttattag |
| | | gtgtaggtgcctataaagggattcgtcatcttacgggtgccaatgaactggataaaaccaagcgccgggaactcatgcttaatgaagtcatcaagcagacacaatccacattg |
| | | tccgcgctaattaatgatctaaattatatttctggaaagtttaacgacgccctggatgcgcataatcggcaaggagaaaaaattctaaaactccagaagatgatgaatgcattga |
| | | ccggtgcagcagatgaattgaataagaaatctaataaaatgcaaaacagtgcactcaaacttaagtgccctgtttatcttgatgaggccaaactcagttcgctgacccgagag |
| | | cccatcaaaaaacaattccatgatgttgttctttcattctacgaagaatatcttgttgaagagcaaaacgatgggaagagtgttgaagtgaaaaaacttaagatcaaagaaaacg |
| | | cttccactcagcaattagagaaacttgccgcgatctttgaaggcatcggctatttcagagcgggggatgttattaaaggcaaactaactgggctattctcataatgaaaaaacc |
| | | agatactcaggtatcggccttgctggtgcagaagcaccagcttgaacaaagcgagcatcaattgggtgaccttgatgctgctctagaagcgcttaacgctttgcaaactgata |
| | | ccgaagcttctttagatgaaatgattttggctatggatggtgttctggaacactcaggtatcacgtttgatgaggatatccacacaacggtttctagtgaattcagcgattaccttg |
| | | aatcctgtttgaccacgtcatcgtccagtatcagtaaactgtcgatgatagaaacaatagcgttcaccagcgatatggactgggaaacctattcccagtccatatcgcagtatgc |
| | | ccataaacacaatatcgatttaatagtcgatccgtttagcgccctgatgtctccaatccaaagaattgctctggaaaaacgtattcaggaagacttgaccttaaagactgcccgc |
| | | tgcgacaaatatgattacatgatcgctggcacctgtggcgttattggcggacttatcgatatttttctggtaggcgtacctggagcaggaaaactgacccagcttgcagataatg |
| | | cagtggacggtgccgttgagaaattcgcttcagcctttggatggaagggcagttcagaagcaagcgattcgacaaaaagcgctatcggttttctggagagaaaattcaaaat |
| | | caattatgaccatcggcatggcggagatgttgacggtttgttcaggatgaacacgaagaatcaccatattaaaagtctcgcccactccccggacttagtcggtttatttttctcga |
| | | tcctggatcaatttaccagtacggcacattttgtggcagacggaaaattggtttccgtagataccgagacttttgagcttaaagggaataacgttgtctctaaggtatttagtggttt |
| | | cgtaaactggctgggccaccttttctctgatatggcaggttcttccggtgcagcagggagaggctccggtatccccattcctttcttttcattacttcagtttattaatgtgggtgaa |
| | | tttggccagcatcgccagtctttcgcaaccgtcgccgtccaggtttttgagaaagggtatgacttacggcatggattagcgatggcgatccccgtcatgattactgagttgcttg |
| | | tgcgaatcacctggacggttaaacaacgttgctatcataagaaggactggggtgaatgtattccttcagcaaataaccctgaactcaggcgaatgttgcttgtggcgcatgga |
| | | accttgtgtctgatggatgtaggagatgcggcacttcgttcaggaggcgaaatgattcagttcctcctgagaacgaacctcatcggctggacgaggtttggaattctagcgatt |
| | | aaagaactccatgtctggtataaagcaggcggaattgatgccaatgctgtagatgaatatatggatcatgaacttcggcgaatgctaaaagcggggtagcgttacggctttgtt |
| | | gaataacattacgtttgggtgcttggctgtaaaaagctaggcaatggcgtatctgtcgacgcaatgcagaaaaggcaacttaattgcgaaacagaaatgttcggtgagttgctt |
| | | gaccgtcctatggcagctaagtgccagaagtcgacgttgctaacatcagtatgtactcatcggcacagtccatgtcagagctattaactatagataaaaattcaataattaataa |
| | | aataagaaccatctttctaggtggttcttattattaacaataaatattacgatttcaacgagggttagaatg (SEQ ID NO: 412) |
| 48 | TerB + | cctggtcctgccaattgctcccccagccatatgacataatccttttgaataatagggtttttatgcttgtactctagcccattcgcggtatcattttacgatctctcttccagttttatgc |
| | DUF279 + | ttaccgcctttgcctatcgtagaacaatgccgggaagcgttatcagcgattaagggcaaggaatgggcttctggatatttgttattatgctggcggttatctggcttctgttttcca |
| | Lhr | aaaagaaaaaatcgccgccccccagagtaaacaacaaaatcatcaccaaaataaatcattcatctcgacagaaatctctcaataagccagataacagcatgacaaatatgca |
| | helcase | ttctcaggcctccgatgatgacgaactggcaacctttacttttgtgaacgggcagacggttgaatacagcaccagccgccagccgtcacgagaaaacgccgcccgtagcaa |
| | | taccactccagcgcgatgggtcaaaccgggagaaagcatcaccattcaaaatgtcgtcattaatcacggttatttttatttcggcgggcggttaaaaacacattcatcaggaga |
| | | atatggatatctttataacgatgactccgacgcttcgctggttaatgacgcttttcccatcgagcctggttcacggcattattatgatgagtcactgggatactggcccagctttgc |
| | | cacactctcccctcgctgccgtggcgcctatcttgactggctggcaagcgatcgcagcgatgcgagctgccccgttggctatgtttttatctatttttacggtctagaacgccgc |
| | | gtactggccgatggcacacaagaagccatttctgacgatgaattcaaagcattattcgaagagatatcgcgcctgagaaccgtatttcaggcaagcggttccttccggcattat |
| | | gcaacgcagttgctggaaatgatgatcgttctccgaccgaagttgctttctatatataccgaaaacgaatatttctcatcgaggagttcattactgttcagattaaatctagcgact |
| | | gtggtcgataaaggacaacctatttgtgccgctctggcactggcatggatatactattttcctgattacaccctgcgcacgcctgcccgtcgatgtcatgctgaattttccgcatt |
| | | attcaaacagcgttatactcaaaaatacggtgacggtattgtcgtcaaacccaataaaacacggttgtatttaagctatacccccgccagtggtacgcttcgggaacttcaggta |
| | | aaaaaacagatggatcttcccgatcccagcgttttaaaagccccagttcagaaattaatttctgttgcagaatcctgtatcaacgcgctggatgcctacagtcgctatctcggta |
| | | aaaaagatgcctcaccaagtgatgtcgccgccatcatgctgcttcccgatgaaatactgaccgaagatgcagaacgtctatttgctgaatttaaacactgggcagatgagaaa |
| | | atccgtgaacattcaggactggcgacagtggctgatttctgggccagactgggtatgcctgtaccggataagattaataagaaagaagccgagctgatgcaaaatttcgccc |
| | | ggcgagcaggctacggcattgcgccggatatgcgctatcaccttgtcagaccggatccagaaggtcatcttgttttatttcctgaagggcatgcggaattctacgtaccgtcg |
| | | gcggaatttacgtcagtctctgtggcgcttcggttgggtgccatgattgcacaaatggacaagcgcgtggatgttgctgaacaggccgcgctggagaaaacgattaatcata |
| | | acgatgcgctgtcgccaacagaaaaacgttcgctgcacgcctacctcacctggcggctcaatacgcctgcaaatcaggctggtctgaaaggtaaaattgagcaactcagcg |
| | | ataaagataaatccactattggcaacgtgattatcagcgtcgcctgcgcagatggaaaaatcgatccggctgaaatcaaacaactggaaaaaatctacgccagcctcggtct |
| | | ggacagcagtgccgttaccagcgatatccaccgactgtcaaccgcagaaacaactccgacagctacgttacaaaccccatcagcgacgagcggcgcgttttctcttgatga |
| | | acggatccttgcccgtcatgaatccgacacaacggacgtacgccagttactgaacaccatcttcaccgaagatgaacccgcagacgaatccccagcggagatcccgccac |
| | | acgctggcgcaggtcttgatgaagcacatcatcaactttaccaacgtttgcaggaaaaagaacgctgggcgcgaaacgaagtcgctgagctatgccagcagtttaatttgat |
| | | gctaagcggcgcgattgaagcaattaatgactggtctttcgaacaggttgacgccccggtgcttgatgatgacgatgatatttacgttgacctggaaattgcacaagaactcaa |
| | | aggataatttatgtctggcattcgtattcgtctcaaagaaagagacgctattattcagtcactgaagtcaggtgttacgcctaaaattggtattcagcacattcaggttggccgggt |
| | | caacgaaataaaagcgctgtatcaggatattgagcgtatcgctgatggcggcgcaggattccggctgattattggggaatatggctcaggtaagacattctttttaagcgttgt |
| | | gcgctcaattgcgctagaaaaaaagctggtgacaatcagcgccgatttatccccggacaggcgcatccacgcgacgggtgggcaggcgcgtaacctctactccgagcta |
| | | atgaaaaatctatccacccgaaataagccggatggaaacgcattattaagcgtggttgagcgctttatcacggaagccagaaaagaagcagaaagtacaaatgtgtcagttc |
| | | cgacgattattcaccaaaagctcgccgccctgtctgatatggttggcggttacgatttcgccaaagtcattgaatgttactggcagggccacgagcaggataatgagacattg |
| | | aaatcaaatgccatccgctggctaagaggtgaatacaccacgaaaaccgacgcccgtaacgatctgggtgtgcgcaccattatttctgatgcctctttctacgattcgctaaag |
| | | ctgatgagcctgtttgtccgtcaggccggatacgcgggtctgctggtgaatctggatgagatggtcaatctgtataagctcagtaacactcaggcccgcgttgccaactatga |
| | | acagatactgcgtattctgaatgactgcctgcaagggacggctgaatatatcggttttttacttggcggtacgccagaattcctgttcgatccgcgcaaggggttgtacagctac |
| | | gaagcgctccagtcccgactggcggaaaatagcttcgctcagcgggctggtgtcattgattattcgtccccttccctgcacttagccagcctgacgccggaagaactctatatt |
| | | ctgttgaaaaaccttcgtcacgtttattccggcggcgatgcggataagtatctggttcctgatgatgctctgacggcatttttacgccactgtagcaacactattggcgatgcctat |
| | | ttccgtacgccacgaaacacgattaaagccttcctggatatgctggccgtgctggaacaaaacccatccattcagtggtcacagttaatcgccggtgtcgcgatcgcggaag |
| | | aaaaacccagtgatatggatgaaataacatcggcagaagatgccgatgaggacggtctggccgacttcagattatgatgaacgaataccagcggctggatccacggatac |
| | | agaagtggatataccggcagggatgggccgatctcagggaactgcaaaaaaaatccgtttcaccgatattagcgggcgatcgggatgttctgatcagcgccgcgactgcc |
| | | gcaggtaaaacagaagcgtttttcctgcccgcctgttctgccattgcggatattcagggcggctttggcattttatacatcagcccgcttaaggccctgattaacgatcagtatc |
| | | gaaggctggaaaacctcggtgatgcgttggagatgccggtcacgccctggcatggtgatgttgcgcagagcaaaaagctgaaagcaaagaagaatcctgccggtattttg |
| | | cttatcaccccggaatcgctggaagcgatgctgatccgcaatgcgggatggttaaagcaggctttcgcgccactggcatatatcgccattgatgaattccatgctttcatcggtt |
| | | ctgagcggggtatgcagcttctctctctgttaaatcgagtcgatcacctgctgggaagaatcaacaatccagtcccccgagtcgcactcagcgcaacgctgggggaactgg |
| | | aacaggtgccgttatctctgcggccaaatcaacgtctgccctgtgacattattaccgacagtcagactcacgccacgctaaaagtacaggtgaaaggttatctggaaccgctg |
| | | accacctcgggccagcaatctccaccgtcggcagagacgcaaatctgccatgatatctttcgcctctgtcgtggtgattcccatctggtgttcgctaatagtcgcaaacggac |
| | | cgaaagcattgccgccacgcttagcgatctcagtgaagcgagcatcgttcccaatgagttctttccccatcacggatctctgtccagagatctgcgtgaaacgctggaacaga |
| | | ggcttcaacaaggcaacttacccaccaccgccatctgtacgatgacgttagagcttggcatcgacatcggtaaagtcagctccgttgtgcaagttaccgccccccattccgta |
| | | gccagcctgcgtcagcgaatgggacgctccggtcggcgcgactcgcctgccgtattgagaatgctgattgccgaacatgaactgacgccaacatcaggcattgtcgacca |
| | | gctcaggcttcagcttgttcagtcgctggccatgatccgcttacttatcggcaacaaatggtttgagccagctgatacccggcagatgcactattccaccctgttccatcagatc |
| | | ctggcgatcgtggcgcagtggggaggcgtgcgtgcggatcagatctggtcacagctatgcctgcaagggccatttcagaaagtccggatctatgacttcaaaacgttattga |
| | | aacatatgggggagcaccagtttctgacccagctctcaagcggcgaactggttctgggcgtcgagggcgaacgtcaggtaaatcaatacaccttctacgccgtgttcagca |
| | | cgccggaagagtttcgcattgtggcggggagcaaaacactgggctccattcccgttgattccccactgatgcctgatcaacacattattttcggcggtcgacgctggaaggta |
| | | accgatatcgatagtgataaaaaagttatttatgtcgaggcgacaaagggtgggcagccgccgttatttggcggacaagggatgtccattcatgatgtcgtccgccaagaaat |
| | | gctcactatttatcgggaaggcgactaccgcatcaccgttggcaatcgcaaggccgattttgccgataccacggccaaaaacctgtttgatgaagggctgcactgttttcgca |
| | | acaataatctggcttcggaatgttttattcagcagagacagcatgtctacattcttccctggctaggcgatcaaaccgtaaacacgttgtcggcattacttatccaacgcggtttc |
| | | aaggcgggctcatttgctggtgtggttgaagtagaaaaaactacggtctcggaggttaaacaagcgttattcagcgcacttcaggaagggctaccttacgaatcccgtcttgc |
| | | cgaaagcatcgttgaaaagtgcctcgaaaaatatgatgagtatttacccgagacgttgctgacgcaggaatatggattacgtgcttttaatattgaacgcgtgacggagtggtt |
| | | gcaggggcatttatattaaggggaagaaga (SEQ ID NO: 413) |

TABLE 17
Genome coordinates of RADAR editing sites in Figure 27

| | | Position in genome | % A-to-I |
|---|---|---|---|
| | | (Genbank: | RNA |
| Site # | Gene | GCA_000005845.2) | editing |
| 1 | ffs | 476502 | 82 |
| 2 | dinQ | 3647752 | 88 |
| 2 | dinQ | 3647753 | 57 |
| 3 | ftsI | 92547 | 90 |
| 4 | lpp | 1757597 | 52 |
| 5 | rpsB | 190414 | 76 |
| 6 | ssrA | 2755713 | 61 |
| 6 | ssrA | 2755714 | 56 |
| 7 | (intergenic) | 3647944 | 69 |
| 7 | (intergenic) | 3647945 | 97 |
| 8 | hokB | 1492029 | 95 |
| 9 | mgrR | 1622894 | 87 |
| 9 | mgrR | 1622895 | 87 |
| 10 | ptsI (1) | 2534135 | 80 |
| 11 | secY | 3443842 | 78 |
| 12 | atpC | 3915927 | 69 |
| 12 | atpC | 3915928 | 76 |
| 13 | rbsB (1) | 3937080 | 76 |
| 14 | rpoA | 3440833 | 74 |
| 15 | rplI | 4426356 | 73 |
| 16 | (intergenic) | 2002020 | 70 |
| 17 | pflB | 951380 | 68 |
| 17 | pflB | 951381 | 58 |
| 18 | ptsI (2) | 2534211 | 68 |
| 19 | rplA (1) | 4179468 | 66 |
| 19 | rplA (1) | 4179469 | 68 |
| 20 | (intergenic) | 127818 | 68 |
| 21 | skp | 200777 | 67 |
| 22 | (intergenic) | 2518138 | 51 |
| 22 | (intergenic) | 2518139 | 66 |
| 23 | rbsB (2) | 3937116 | 65 |
| 24 | infC | 1800153 | 65 |
| 25 | rplT | 1799499 | 64 |
| 26 | gapA (1) | 1863658 | 64 |
| 27 | sodB | 1735694 | 62 |
| 28 | gapA (2) | 1862864 | 61 |
| 29 | rpsC | 3449386 | 61 |
| 30 | leuW | 697012 | 61 |
| 31 | rpsA | 962878 | 60 |
| 32 | ibsC | 3056901 | 60 |
| 33 | ahpC | 639397 | 59 |
| 33 | ahpC | 639398 | 56 |
| 34 | oxyS | 4158372 | 59 |
| 35 | rpmG | 3811305 | 58 |
| 36 | (intergenic) | 780980 | 57 |
| 37 | iscU | 2660065 | 57 |
| 38 | ryfD | 2734233 | 56 |
| 39 | deaD | 3306635 | 56 |
| 40 | hns | 1292675 | 56 |
| 41 | (intergenic) | 4392565 | 56 |
| 42 | tig | 456390 | 56 |
| 42 | tig | 456391 | 56 |
| 43 | rplA (2) | 4178970 | 56 |
| 44 | tsf | 191433 | 51 |
| 44 | tsf | 191434 | 55 |
| 45 | rnpB | 3270434 | 54 |
| 46 | (intergenic) | 781019 | 54 |
| 46 | (intergenic) | 781020 | 52 |
| 47 | eno | 2906708 | 52 |
| 48 | (intergenic) | 3071334 | 51 |

TABLE 18A
Description of phage T2 fragments in FIGS. 28C-28E

| Fragment | Length | A93% | | A121% | | Gene | | | |
|---|---|---|---|---|---|---|---|---|---|
| # | (bp) | editing | | editing | | # | Accession | Gene | Description |
| 1 | 2392 | 28 | 23 | 37 | 32 | 1 | AYD82599.1 | rIIA.1 | hypothetical protein |
| | | | | | | 2 | AYD82598.1 | rIIA | protector from prophage-induced early lysis |
| 2 | 1818 | 5 | 5 | 6 | 6 | 1 | AYD82600.1 | gp39 | DNA topoisomerase II large subunit |
| 3 | 261 | 6 | 6 | 8 | 9 | 1 | AYD82601.1 | gp39.1 | hypothetical protein |
| 4 | 1423 | 8 | 5 | 10 | 8 | 1 | AYD82606.1 | — | hypothetical protein |
| | | | | | | 2 | AYD82605.1 | cef | modifier of suppressor tRNAs |
| | | | | | | 3 | AYD82604.1 | goF | mRNA metabolism modulator |
| | | | | | | 4 | AYD82603.1 | gp39.2 | hypothetical protein |
| | | | | | | 5 | AYD82602.1 | — | hypothetical protein |
| 5 | 3570 | 6 | 9 | 7 | 11 | 1 | AYD82613.1 | srd | anti-sigma factor |
| | | | | | | 2 | AYD82612.1 | dda.1 | hypothetical protein |
| | | | | | | 3 | AYD82611.1 | dda | DNA helicase |
| | | | | | | 4 | AYD82610.1 | dexA.2 | hypothetical protein |
| | | | | | | 5 | AYD82609.1 | dexA.1 | hypothetical protein |
| | | | | | | 6 | AYD82608.1 | dexA | exonuclease |
| 7 | 1339 | 38 | 44 | 49 | 56 | 1 | AYD82628.1 | — | hypothetical protein |
| | | | | | | 2 | AYD82627.1 | dam | DNA adenine methyltransferase |
| 8 | 201 | 4 | 2 | 5 | 3 | 1 | AYD82629.1 | — | hypothetical protein |
| 9 | 442 | 1 | 1 | 2 | 2 | 1 | AYD82635.1 | dmd | discriminator of mRNA degradation |
| | | | | | | 2 | AYD82634.1 | gp61.4 | hypothetical protein |
| 10 | 2956 | 22 | 20 | 29 | 27 | 1 | AYD82638.1 | uvsX | RecA-like recombination protein |
| | | | | | | 2 | AYD82637.1 | gp40 | head vertex assembly chaperone |
| | | | | | | 3 | AYD82636.1 | gp41 | helicase |
| 11 | 2697 | 2 | 2 | 3 | 3 | 1 | AYD82644.1 | gp43 | DNA polymerase |
| 12 | 687 | 3 | 3 | 5 | 4 | 1 | AYD82648.1 | gp45 | sliding clamp |
| 13 | 588 | 85 | 85 | 93 | 92 | 1 | AYD82650.1 | gp45.2 | hypothetical protein |
| | | | | | | 2 | AYD82649.1 | rpbA | RNA polymerase binding protein |
| 14 | 1203 | 52 | 46 | 59 | 53 | 1 | AYD82657.1 | a-gt | DNA alpha glucosyl transferase |
| 15 | 545 | 27 | 22 | 48 | 40 | 1 | AYD82664.1 | gp55.2 | hypothetical protein |
| | | | | | | 2 | AYD82663.1 | gp55.1 | hypothetical protein |
| 16 | 3394 | 60 | 57 | 69 | 67 | 1 | AYD82674.1 | gp49 | recombination endonuclease VII |
| | | | | | | 2 | AYD82673.1 | nrdD | anaerobic ribonucleotide reductase subunit |
| | | | | | | 3 | AYD82672.1 | nrdG | anaerobic NTP reductase small subunit |
| | | | | | | 4 | AYD82671.1 | — | hypothetical protein |
| | | | | | | 5 | AYD82670.1 | gp55.8 | hypothetical protein |
| | | | | | | 6 | AYD82669.1 | nrdH | glutaredoxin |
| 18 | 2329 | 3 | 2 | 5 | 3 | 1 | AYD82686.1 | nrdC.5 | hypothetical protein |
| 19 | 528 | 5 | 5 | 8 | 8 | 1 | AYD82689.1 | nrdC.8 | hypothetical protein |
| 20 | 303 | 2 | 1 | 3 | 2 | 1 | AYD82690.1 | nrdC.9 | hypothetical protein |
| 21 | 2659 | 30 | 31 | 33 | 36 | 1 | AYD82699.1 | mobD.2 | hypothetical protein |
| | | | | | | 3 | AYD82693.1 | nrdC.11 | hypothetical protein |
| 22 | 902 | 6 | 6 | 7 | 7 | 1 | AYD82706.1 | rI.1 | hypothetical protein |
| | | | | | | 2 | AYD82705.1 | rI | lysis inhibition regulator |
| | | | | | | 3 | AYD82704.1 | rI.-1 | hypothetical protein |
| 23 | 2602 | 4 | 4 | 6 | 7 | 1 | AYD82724.1 | ip4 | hypothetical protein |
| | | | | | | 2 | AYD82721.1 | vs.7 | hypothetical protein |
| | | | | | | 3 | AYD82720.1 | vs.6 | hypothetical protein |
| | | | | | | 4 | AYD82719.1 | vs.5 | hypothetical protein |
| | | | | | | 5 | AYD82718.1 | vs.4 | hypothetical protein |
| | | | | | | 6 | AYD82717.1 | vs.3 | hypothetical protein |
| 24 | 495 | 6 | 5 | 10 | 8 | 1 | AYD82725.1 | e | lysozyme murein hydrolase |
| 25 | 594 | 7 | 5 | 9 | 8 | 1 | AYD82730.1 | e.6 | hypothetical protein |
| 26 | 177 | 3 | 3 | 4 | 4 | 1 | AYD82731.1 | — | hypothetical protein |
| 27 | 264 | 3 | 2 | 4 | 3 | 1 | AYD82732.1 | e.8 | hypothetical protein |
| 28 | 351 | 7 | 6 | 10 | 10 | 1 | AYD82733.1 | — | hypothetical protein |
| 29 | 402 | 5 | 4 | 8 | 5 | 1 | AYD82734.1 | trna.1 | hypothetical protein |
| 30 | 991 | 2 | 2 | 6 | 4 | 1 | AYD82737.1 | trna.4 | putative membrane protein |
| | | | | | | 2 | AYD82736.1 | trna.2 | hypothetical protein |
| | | | | | | 3 | AYD82735.1 | — | hypothetical protein |
| 31 | 309 | 6 | 5 | 8 | 9 | 1 | AYD82738.1 | ip7 | hypothetical protein |
| 32 | 255 | 20 | 19 | 26 | 25 | 1 | AYD82739.1 | ip5 | hypothetical protein |
| 33 | 1423 | 28 | 27 | 36 | 36 | 1 | AYD82742.1 | gp1 | deoxynucleoside monophosphate kinase |
| | | | | | | 2 | AYD82741.1 | gp57A | chaperone for tail fiber formation |
| | | | | | | 3 | AYD82740.1 | gp57B | hypothetical protein |
| 34 | 1277 | 54 | 54 | 69 | 72 | 1 | AYD82745.1 | gp50 | head completion protein |
| | | | | | | 2 | AYD82744.1 | gp2 | DNA end protector protein |
| 35 | 8107 | 2 | 2 | 3 | 3 | 1 | AYD82755.1 | gp9 | baseplate wedge tail fiber connector |
| | | | | | | 2 | AYD82756.1 | gp10 | baseplate wedge subunit and tail pin |
| | | | | | | 3 | AYD82757.1 | gp11 | baseplate wedge subunit and tail pin |
| | | | | | | 4 | AYD82758.1 | gp12 | short tail fibers protein |
| | | | | | | 5 | AYD82759.1 | wac | fibritin |
| | | | | | | 6 | AYD82760.1 | gp13 | neck protein |
| | | | | | | 7 | AYD82761.1 | gp14 | neck protein |
| 36 | 5149 | 33 | 37 | 46 | 50 | 1 | AYD82762.1 | gp15 | tail sheath stabilizer and completion protein |
| | | | | | | 2 | AYD82763.1 | gp16 | small terminase protein |
| | | | | | | 3 | AYD82764.1 | gp17 | large terminase protein |
| | | | | | | 4 | AYD82765.1 | gp18 | tail sheath protein |
| 37 | 492 | 4 | 4 | 6 | 6 | 1 | AYD82766.1 | gp19 | tail tube protein |
| 38 | 1284 | 2 | 3 | 3 | 4 | 1 | AYD82773.1 | gp24 | capsid vertex protein |
| 39 | 1476 | 35 | 33 | 45 | 40 | 1 | AYD82863.1 | gp24.3 | hypothetical protein |
| | | | | | | 2 | AYD82775.1 | gp24.2 | hypothetical protein |
| 40 | 1807 | 17 | 23 | 23 | 30 | 1 | AYD82776.1 | inh | inhibitor of prohead protease |
| 41 | 832 | 1 | 3 | 2 | 3 | 1 | AYD82781.1 | uvsY | recombination, repair and ssDNA binding |
| | | | | | | | | | protein |
| | | | | | | 2 | AYD82780.1 | uvsY.-1 | hypothetical protein |
| | | | | | | 3 | AYD82779.1 | uvsY.-2 | hypothetical protein |
| 42 | 1025 | 1 | 1 | 2 | 2 | 1 | AYD82783.1 | gp26 | baseplate hub subunit |
| | | | | | | 2 | AYD82782.1 | gp25 | tail lysozyme |
| 43 | 6240 | 1 | 1 | 1 | 1 | 1 | AYD82784.1 | gp51 | baseplate hub assembly protein |
| | | | | | | 2 | AYD82785.1 | gp27 | baseplate hub subunit |
| | | | | | | 3 | AYD82786.1 | gp28 | baseplate hub distal subunit |
| | | | | | | 4 | AYD82787.1 | gp29 | baseplate hub subunit tail length |
| | | | | | | | | | determinator |
| | | | | | | 5 | AYD82788.1 | gp48 | baseplate subunit |
| | | | | | | 6 | AYD82789.1 | gp54 | baseplate subunit |
| 44 | 291 | 1 | 1 | 2 | 2 | 1 | AYD82790.1 | alt.-3 | hypothetical protein |
| 45 | 4155 | 2 | 2 | 3 | 3 | 1 | AYD82792.1 | alt | ADP-ribosyltransferase |
| | | | | | | 2 | AYD82791.1 | alt.-1 | hypothetical protein |
| 46 | 366 | 6 | 7 | 8 | 9 | 1 | AYD82801.1 | gp30.7 | hypothetical protein |
| 47 | 177 | 6 | 6 | 9 | 9 | 1 | AYD82802.1 | gp30.9 | hypothetical protein |
| 48 | 249 | 2 | 3 | 3 | 4 | 1 | AYD82803.1 | rIII | lysis inhibition accessory protein |
| 49 | 336 | 1 | 2 | 2 | 2 | 1 | AYD82804.1 | gp31 | head assembly cochaperone with GroEL |
| 50 | 1698 | 4 | 3 | 6 | 4 | 1 | AYD82809.1 | cd.2 | hypothetical protein |
| | | | | | | 2 | AYD82808.1 | cd.1 | hypothetical protein |
| | | | | | | 3 | AYD82807.1 | cd | deoxycytidylate deaminase |
| | | | | | | 4 | AYD82806.1 | gp31.2 | hypothetical protein |
| | | | | | | 5 | AYD82805.1 | gp31.1 | hypothetical protein |
| 51 | 276 | 3 | 3 | 5 | 5 | 1 | AYD82810.1 | cd.3 | hypothetical protein |
| 52 | 3683 | 5 | 6 | 7 | 8 | 1 | AYD82823.1 | td | thymidylate synthetase |
| | | | | | | 2 | AYD82822.1 | nrdA.2 | hypothetical protein |
| | | | | | | 3 | AYD82821.1 | nrdA.1 | hypothetical protein |
| | | | | | | 4 | AYD82820.1 | nrdA | ribonucleoside-diphosphate reductase |
| | | | | | | | | | subunit alpha |
| 53 | 1448 | 45 | 62 | 58 | 69 | 1 | AYD82827.1 | frd.1 | hypothetical protein |
| | | | | | | 2 | AYD82826.1 | — | hypothetical protein |
| | | | | | | 3 | AYD82825.1 | frd | dihydrofolate reductase |
| | | | | | | 4 | AYD82824.1 | — | hypothetical protein |
| 54 | 366 | 1 | 2 | 2 | 3 | 1 | AYD82828.1 | frd.2 | hypothetical protein |
| 55 | 228 | 11 | 11 | 16 | 16 | 1 | AYD82829.1 | frd.3 | hypothetical protein |
| 56 | 909 | 2 | 3 | 3 | 4 | 1 | AYD82830.1 | gp32 | single-stranded DNA binding protein |
| 57 | 2162 | 40 | 48 | 51 | 67 | 1 | AYD82834.1 | rnh | RnaseH |
| | | | | | | 2 | AYD82833.1 | dsbA | double-stranded DNA binding protein |
| | | | | | | 3 | AYD82832.1 | gp33 | late promoter transcription accessory protein |
| | | | | | | 4 | AYD82831.1 | — | hypothetical protein |
| 58 | 4997 | 3 | 2 | 5 | 3 | 1 | AYD82835.1 | gp34 | long tail fiber proximal subunit |
| | | | | | | 2 | AYD82836.1 | gp35 | hinge connector of long tail fiber proximal |
| | | | | | | | | | connector |
| 59 | 417 | 42 | 48 | 46 | 54 | 1 | AYD82859.1 | — | hypothetical protein |
| | | | | | | 2 | BBC14887.1 | ndd.6 | putative outer membrane protein |
| | | | | | | 3 | AYD82858.1 | ndd.5 | putative outer membrane protein |
| 60 | 1166 | 26 | 27 | 29 | 31 | 1 | AYD82862.1 | rIIB | protector from prophage-induced early lysis |
| | | | | | | 2 | AYD82861.1 | denB.1 | hypothetical protein |

TABLE 18B
DNA sequences of fragments #1-60 in Table 18A

| Frag- | |
|---|---|
| ment | |
| # | DNA sequence |
| 1 | atgaaatcatatagagtaaatttagaactttttgataaagcagttcatcgagaatatagaatcattcaacgctttttcgatatgggagaagccgaagaatttaaaaaccgctttaaggatattagag |
| | ataaaattcaatccgacaccgcaactaaagatgaattactagaagttgctgaagttattaagcgtaatatgaattaatgaggaaattatgattatcaccactgaaaaagaaacaattcttggtaat |
| | ggttctaaatcaaaagcatttagcatcacagcatctcctaaagtatttaaaattctgtcatctgatttgtatacaaacaaaattcgcgcagtagtccgtgaattgattactaacatgattgatgccca |
| | tgctctcaatggaaatcctgaaaaatttatcattcaagttccaggacgattagatccgcgatttgtttgtcgagattttggtccgggtatgagtgattttgatattcagggtgatgataattctcctgg |
| | gctgtataattcatacttcagttcatctaaagctgaatctaatgatttcattggtggatttggtttaggttctaaatctccgtttagttatactgatacgtttagtattacttcataccataaaggtgaaatt |
| | cgtggttatgtagcttacatggatggtgatggcccacagattaaacctacattcgtaaaagaaatgggtccagatgataaaactggcattgaaatcgtagttccagttgaagaaaaagacttta |
| | gaaactttgcttatgaagtttcttatatcatgcggccgttcaaagatttggctatcattaatagtcttgaccgtgaaattgactattttccggattttgatgattattacggcgtaaatccagaaagata |
| | ctggcctgatcgtggtggattatatgctatctatggcggtattgtttatcctattgatggtgttattagagaccgcaactggttaagcattcgcaatgaagtgaattacattaagtttccaatgggttc |
| | acttgatattgctccatctcgcgaggctctttcacttgatgatcgtactcgtaaaaatattattgagcgagttaaagaactcagtgagcaagcatttaatgaagatgtaaaacgatttaaagaatct |
| | acatctcctcgtcacacatatcgtgaattgatgaagatggggtattctgctcgagattatatgattagtaattcagtcaaattcacgactaaaaatctgtcatataagaagatgcagagtatgtttg |
| | aacctgatagtaagttatgcaatgcaggagttgtgtatgaagtaaatcttgaccctcgactgaagcgcattaagcaaagtcatgaaacttcagccgttgcatcaagttatcgtctgtttggtatta |
| | atacaacaaaaattaatattgttattgataatattaaaaatcgtgttaatattgtccgtggattagcacgtgcgttagatgatagtgaatttaataacactttgaatattcatcacaatgagcgtcttct |
| | gtttattaacccagaagtagaatcgcagattgatttgcttcctgatattatggcaatgtttgaaagtgatgaagttaacattcattatttgtcagaaatcgaagctttagttaaaagctatattccaaa |
| | ggtagttaaaagtaaagctcctcgtcctaaagctgctacagcatttaagtttgaaattaaagacgggcgctgggaaaaagaggaactatttacacttacgtcagaagcagatgaaattactgg |
| | ttatgtagcgtatatgcatcgttctgatattttctctatggatggtactacatctctttgtaatccatctatgaatattttgattcgtatggctaatcttattggcattaatgaattttatgttattcgtccgctt |
| | ttacagaaaaaggtaaaagaactcggtcagtgccaatgtatttttgaaactctacgcgatttatatgtagatgcttttgatgatgtagattatgataagtatgtaggttattcaagttcagctaaacg |
| | atatattgataaaattatcaagtatcctgagctagattttatgatgaagtacttcagtgtagatgaagtttctgaagaatatacacgactcgctaatatggttagttcattacagggtgtatattttaat |
| | ggtggaaaagataccattggtcatgacatctggacagtaactaatctttttgatgtattatcaaataatgcttcaaaaaacagtgataaaatggttgctgagtttaccaagaaattccgtattgtttc |
| | cgacttcatcggatatcgcaactctttaagtgatgatgaagtttctcaaatcgctaaaactatgaaggcccttgcggcctaa (SEQ ID NO: 414) |
| 2 | atgattaagaatgaaattaaaattctgagcgatattgaacacatcaaaaagcgtagtggcatgtatattggctcttctgctaatgaaatgcatgagcgctttctgtttggtaaatgggaaagtgttc |
| | agtatgtacctggtcttgttaagcttattgatgaaattatcgataactcagtagatgaaggtattcgtactaagtttaaattagcaaataaaattaatgttactattaaaaacaatcaagtaacagttg |
| | aagataacggtcgtggtattccacaagcgatggttaaaacacctactggtgaagaaattcctggtccagttgctgcatggactattccaaaagcaggtggtaactttggtgatgataaagaac |
| | gcgtcaccggtggtatgaatggtgttggttctagtttgacaaacattttttctgtgatgtttgtcggtgaaactggcgatggtcaaaataatattgtagttcgttgttcaaatggcatggaaaataaa |
| | tcatgggaagatattcctggaaaatggaaaggaactcgtgttactttcattcctgattttatgtcatttgaaactaatgagctgtcccaagtttatcttgacattacacttgatcgtctccagacgctt |
| | gctgtagtttatcctgatattcaatttacctttaatggtaaaaaggttcagggcaattttaagaaatatgcacgacagtatgatgaacatgctattgttcaagaacaagaaaattgttctattgcggtt |
| | ggtcgttcaccggatggttttcgtcagttgacgtacgtcaataacattcatactaagaatggtggccatcatattgactgtgttatggatgatatttgtgaagaccttattccacaaatcaaacgta |
| | aattcaaaattgatgtaactaaagcacgtgttaaagaatgtttgactatcgttatgtttgttcgcgatatgaaaaacatgcgatttgactctcaaactaaagaacgacttacttctccttttggtgaaa |
| | ttcgtagtcatattcaacttgatgctaaaaagatttcacgcgctattctaaataatgaagcaattttaatgccaattattgaagcagcattagctcgtaaattggcggcggaaaaagcagcagag |
| | acaaaggcagctaaaaaagcttctaaagctaaggttcataaacatatcaaagcgaatctttgtggtaaagatgctgatactactcttttcttgactgagggtgattctgctatcggatatcttattg |
| | atgttcgtgataaagaacttcatggtggttatccattgcgtggtaaagttcttaatagctggggtatgtcatatgccgatatgcttaaaaacaaagaactatttgatatttgcgcaatcactggtcta |
| | gttcttggtgaaaaagctgaaaacttgaattatcataatattgctattatgactgatgctgaccatgatggtctaggaagcatttatccttctctgctcggattttttagtaattggccagaattgtttg |
| | agcaaggacgaattcgctttgtcaaaactcctgtaatcatcgctcaggtcggtaaaaaacaagaatggttttatacagtcgctgaatatgagagtgccaaagatgctctacctaaacatagcat |
| | ccgttatattaaaggacttggctctttggaaaaatctgaatatcgtgaaatgattcaaaatccagtatatgatgttgttaaacttcctgagaactggaaagagctttttgaaatgctcatgggagat |
| | aatgctgaccttcgtaaagaatggatgagccagtag (SEQ ID NO: 415) |
| 3 | atgaaatatattaatcgttctatcgcagcattagtattagcagtgtctttagtaggatgtactgatgctgataatgcaacaaaagttttgtcttcaagtggttttactaatattgaaatcactggatata |
| | attggtttggttgctctgaaaatgatttccagcatactggatttcgtgctattggacctaccgggcagaaagtagaaggaacagtatgttctggtttattcttcaaagattcgactatccgttttaaat |
| | aa (SEQ ID NO: 416) |
| 4 | atggaaaacttaattatcatcgagcaatctttcaacgattatggtatggcttatggttatcgtgcgataatggaagattctcgtggatgtgttatcgatattgctgaatgtaaagatttactgcagctt |
| | ttgaagattgttcgcaaaaattgggattgtgaaaatattaaagttcgaattgttacagaagaagaaactgtttttcatgatgtaaaattcgctaaaggtgctgctactcttctgaaacgtatcgctcc |
| | actgttcaattaatgaggaaattataatgaaacgtaaaattgttcagaactgcactaatgatgaatttgaagatgtattattcgatccagatttggtagtagttcaaaaggaacacaccatcaagttt |
| | actcacttgacttcggtttatgtgtatgagaaagtcggtgataaacaaccaatttacggtgtatttcgtgaaattactgaagatggcacaacttactggaaggaaatttattaatggctattaaattt |
| | gaagttaataaatggtatcaatttaaaaataaacaagctcaagaaaattttattaaagaccatactgataacggaatctatgcacgccgtttaggtatgcatccttttaaaattttagatgttgattat |
| | ctttggcgtcctactaaaattgtgacatctactggcacagttggatatgcaacacacggtgatatccttgacgaaaactttatctggctttctactaacgaagctgggttctttgatgaagtggaaa |
| | atccatatcaggcagttgaagagcaagagcaggaagagaaagagcaagaacaaatagaagatttcacagaattcccagtaatgaaagttactattgaaaataatgaacaggcatggtcctt |
| | gtatcaaatgctgaaagcacactttaaggaataattatgccaatgtatgattataaatgccaatccgaagattgcgggcatgaatatgaaaaaattaaaaagatttctgaacgagaaaatgatgt |
| | ttgccctaaatgtcatcgtttgtctactcgtcggccttctgctcctaagcatgtgaatggtggtttttacgacttacttaaagggtaattatgtttaaaatcggtaagaaatattgcattcgtgaaggt |
| | gaagaacagaaatatctactttctgctagtaataggaatagttctattaatgctgtaatattgactagtgaatttatcgttgaagatatgaaaggtcataatgttacaatgattagtacagcatctgg |
| | aaatgatggaaaaattcttcatagttgtcagagtaatgttctaatttatgatgaagaatttgacttcttcaaagaagtttccgaagattttgattttgaatgtactattactatgaaatctggtgaccctc |
| | tttcttttacagttagatga (SEQ ID NO: 417) |
| 5 | atgaagctgcataatatgtctaataatcaaattcgtaaaattaaacgtcgtttagagcatactcaggcatctgctaaaagacgttctaaagattttaacttagacttcaattacattaagaacatttta |
| | gaccaaaaagtttgcgcttactcgggagaaccttttgataatcgtattgaaggagagaaattatcattagaacgttttgataataacgttggatacattaaagggaatgttattgcagtaaagaaa |
| | aagtataatacatttcgttctgattatactttagaggagttaattgaaaaacgtgatttgtttgctttgcgaattggtcgttcatctgcgaaaaaagttcataaactaaatttagatgaaaagaaatgg |
| | gctaaaatcaaaaagacttataatcaaattaaagctatacagaaaaaacgtgaaaaccgaattgaacacatttctcagattctaaatcaaaacagacctctgacattaagctaagaattatagc |
| | acttaaagctcgtattgatggttctcgtatagcagaaggcgctgaagttgttaaattgaacgttcttcttaaaggctcggattggaaaactgtgaaaaagttgtcagaagcagaaatgcaatatg |
| | atatgtgtgataaaattattcaaggtgtagagcggtatcaaaacttgtcttttattgataaacttaaactgaaaagaggatatccgctaaattgttcaatttttaaacttatccgaggataatatggttt |
| | atgtatatgcgatagtttaccgagacaaagacggatttacggcgccagttccgcttgatgaacatcgtcctgctgtattttttgaatggaagattgctgataaagtatttaccactcttaaagagca |
| | gtatcaactagctttaggtaagggaattccaagattagttgagactccacgcaagttttggtttaataaaatagaagttaaacatgttaagcctgatgtagacacacaaagattatatcggcgaat |
| | tttagatactgggcgtattgttagtataccaattgcagggaatttacgatgacatttgatgatttgaccgaaggtcaaaaaaatgcctttaacattgttatgaaggctattaaagaaaagaaacatc |
| | atgtaactattaatggacctgctggtaccggtaagactactcttactaagttcatcattgaagctttaatatctacgggtgaaactggtattattttagcagctcctactcatgcagctaaaaagatt |
| | ctttcaaaactatcatggaaagaagcgagtactattcatagtattcttaaaattaacccagtaacatacgaagaaaacgttctttttgaacaaaaagaagtaccagatttagctaaatgcagggta |
| | ttaatctgcgatgaagtgtcaatgtatgatagaaagctatttaaaattctgctttcaactatcccgccgtggtgtactataattggaataggcgataataagcaaattagacctgttgacccagga |
| | gaaaatactgcttatatcagtccattctttacacacaaagatttttatcagtgtgaactcactgaagttaaacgcagtaatgctcctattattgatgtagctactgacgttcgtaacggtaagtggatt |
| | tatgataaagttgttgacgggcatggagtacgtggatttactggtgataccgctttacgcgattttatggtaaattatttttcaatcgtcaaatctttagatgatttgtttgaaaatcgcgtaatggcat |
| | ttacgaataaatctgttgataagttaaatagcattattcgtaaaaagatttttgaaactgataaagattttattgttggtgaaattattgtaatgcaggaaccattaattaaaacatataaaattgatgg |
| | aaagcctgtgtcagaaattatttttaataacggacaattagttcgtattatagaagcagagtatacatcaacgtttgttaaagctcgtggtgttcctggagaatacttaattcgtcattgggatttaac |
| | agtagaaacttacggcgatgatgaatattatcgtgaaaagattaaaataatttcatctgatgaagaactatataagtttaacctatttttaggtaaaacagcagaaacttataaaaattggaacaaa |
| | ggtggaaaagctccatggagtgatttttgggatgctaaatcacagttcagtaaagtgaaagcacttcctgcatcaacattccataaagcgcaaggtatgtctgtagaccgtgctttcatttatac |
| | accttgtattcattatgcagatgctgaattggctcaacaacttctttatgttggtgttacccgtggtcgttatgatgtattttatgtatgattaaatttgaggaagctattcgtggaaataactaaagatc |
| | agttttatcttcttcaagataaagtaagcgaaatttatgaaattgctcatggtaaaaatcgtgaaactgtaaaaattgaatctagtaagttgatgcttcaattagaagaaattgaacgagatttaattg |
| | cgttagaattcttttgtggcgaagtgaaaactgttacaattaatgattatgttttaggcgaaattagctatctttatgaggcgattattaatgattgaattaagttggtgccagtttaaatctcttatgac |
| | aaatgttaaagctgtcattgaagaaaatcagggtcctgaaaatattactattcgcgaaaaagctttaaagatagtatacagtcttgaagaaatacaaaaagatattgaatctatggcaaaatttatt |
| | gatgagcctattaataaagtttatattcaagactatactgtaggtcaaattcgcgatttagcgaggaaagtttaatgtttgattttattatagattttgaaacaatgggaagtggtgaaaaagcagct |
| | gttattgatttggctgtaattgcttttgaccctaatccagaagtcgttgaaacattcgatgaattagtttcacgtggcattaaaatcaaatttgatttaaaaagccaaaaaggacatcgtctttttacta |
| | aaagcactatcgaatggtggaaaaatcaatctcctgaagctcgaaaaaatattgcaccatcagatgaagatgtaagcactatcgatggtattgcaaaatttaatgattacatcaatgcacataat |
| | atcgatccttggaaatctcaaggctggtgtcgtggaatgtcatttgattttccaattttagtcgatctcattcgtgatattcaacgccttaatggtgtatctgagaatgagcttgacacatttaagttag |
| | aaccatgtaaattctggaatcagcgtgatattcgtaccagaattgaagcacttctgcttgttcgtgatatgaccacgtgtcctcttccaaaaggaactttagatggattcgttgcgcatgattctatt |
| | catgactgtgcgaaagacatcctgatgatgaagtatgctttgcgatatgctatgggtcttgaagatgctccatcagaggaagaatgcgatcctctatctcttccaacaaaacgataa (SEQ |
| | ID NO: 418) |
| 7 | atgattaataaaattgtgcatgaaatggctttaaacggagattcatataaaatatctgccgtagttgaaaatttcatacttaataaagtaaaagaatatttcactgattgttcagttagttatcaagaa |
| | aaaatggttttaattgatgatactgaaaaatcaaataatttgttttgctctaattttataactaaaaagcgtactagaagatttgatattgttatttctcgcaacggtaaaaagcatataattgaaattaa |
| | acaccaagttggtggaggtacagctattgattcggttggaatatatttagaagataaagagaaattaaaagaatacacaaaaactgaaaaccctgtgtcattgatgatattagattttttgccatg |
| | cggatattatccacgtaataaatggacaaaaagagaatcatttactgataatccaaccatccaagcaaggtttaatgaatatgctaaatcacaaaacgtgttagtattattatcaaatacatatgat |
| | gaagaattgtataattcatttttgctgcaataaatgagagaatataatgctaggagctatcgcgtatacgggtaataaacaatcattattacctgaacttaagcctcactttccgaaatatgacaga |
| | ttcgtggatttattttgtggaggtttatcagtgtctttgaacgtcaatggtcctgtattggccaatgatattcaagaaccaattattgaaatgtataagcgtcttattaatgtatcatgggatgacgtttt |
| | aaaagtaataaagcaatacaaactatcaaaaacatcaaaagaagagtttttgaaattacgtgaagattataataaaactagagatcctcttttactttatgttcttcattttcacgggtttagtaatat |
| | gattcgtataaacgataaaggaaattttactactccgtttggaaaaagaactataaacaaaaatagtgaaaaacgctttaatcactttaaacaaaattgtgataaaataatctttagttcattgcattt |
| | taaagatgtcaaaattctagacggcgattttgtatatgtggaccctccgtatcttataacagttgctgattataataaattttggtcagaagaagaagaaaaagaccttttaaatcttttagattcttta |
| | aatgacagaggaataaaatttggactgtcgaatgttttagagcatcacggaaaggaaaacactcttcttaaagaatggtctaaaaaatataatgttaagcatcttaataaaaaatacgtctttaac |
| | atatatcattccaaagaaaagaatggaactgatgaagtatatatttttaattaa (SEQ ID NO: 419) |
| 8 | atggtacaaaaattaatggcacttgttaatgccatcaaaggtaataaaaagcgtatagcttttactatttctgctatggtaggaattttactctggaactttattttatcacctgttgcaattgcacatg |
| | gtattaatattccaatagttactcttgatacattcgtagatttagcatttgctttagttgggttaatttaa (SEQ ID NO: 420) |
| 9 | atggaattggtaaaggtagtttttatggggtggtttaagaatgaaagcatgtttactaaagaaaccacaatgatgaaagatgacgttcaatgggctactactcaatatgctgaagttaataaagc |
| | attagttaaagctttcattgatgataagaaagtgtgtgaagtggattgccgaggataatatgcatattgttttatttaaacctactccgtataacgtcaggaaaaatacgcaattcaaagcacttatt |
| | gcagatacgtgggaattggtgttagatattccagcagaagaaagtcctccatttggtcgagtggaatttattaagtttgctgttcgccctacgaagcggcagattcgccaatgcaaaagatactt |
| | tcgtaagatcgttaagctagagaaacagtttgtaacatgtgattacgcaaaagttttaaaataa (SEQ ID NO: 421) |
| 10 | atgtctattgcagatttaaaatcccgtttgattaaagcttccacttctaaaatgactgctgagctgactacatctaaattctttaatgaaaaggatgtaatccgtacaaaaatcccaatgcttaatatt |
| | gctatttctggtgcgattgatggtggtatgcagtctggtttaactattttcgcagggccttctaaacactttaaatcaaatatgtctttgactatggttgcggcatatttgaacaaatatcctgacgcg |
| | gtttgtctattctatgatagcgaatttggtattactccagcttatttgcgatccatgggagttgacccggaacgagtaattcatacgccaattcagtcagttgaacagctgaaaattgatatggtga |
| | accagcttgaagctattgagcgtggtgaaaaggttattgtattcatcgactcaatcggtaatatggcttctaagaaagaaacggaagatgccttgaatgaaaaatctgtggcagatatgactcg |
| | tgctaaatcactgaagtcattattccgtattgttactccttattttagcattaaaaatattccgtgtgttgcggttaaccatacaattgaaacaattgaaatgtttagtaaaaccgtgatgacaggtggt |
| | acaggcgtaatgtattcggctgatactgtattcattatcggtaaacgtcagattaaagatggttctgatcttcaggggtatcaatttgttctaaatgtagaaaaatctcgtaccgttaaagaaaaaa |
| | gtaaattttttattgatgttaaatttgacggtggtatcgatccttattctggattgttagatatggctctagaattaggattcgtggtaaaacctaagaatggttggtatgctcgtgaatttcttgacgaa |
| | gaaaccggcgagatgattcgcgaagaaaaatcttggcgtgcaaaagatactaactgcactacattctggggtcctttatttaagcatcaaccattccgagatgctattaaacgtgcttatcagtt |
| | aggtgctattgatagtaatgaaattgttgaagctgaagttgatgaattgattaactcaaaggttgaaaaatttaaatctccagaaagtaaaagtaaatcagcagctgatttagaaactgacctcga |
| | acagttaagtgatatggaagaatttaatgaataaagatgatttagatttagatctagaaattatcgatgaatccccctcttcggagggggaagaagaaagaaaagaacgtctttttaatgagtct |
| | cttaagataattaaatccgctatggaaaatgttatccaggagattgtcattaaactagaagatggttctacacatatagtgtatgtaacaaaactggattgggttgatggaaaggttgtaatggac |
| | tttgctgttcttgaccaagaaagaaaagctgagttagctcctcatgtagaaaaatgtattacaatgcaattacaagatgcatttaataaaaggtcaaagaaaaaatttaaattcttttaaggagtaa |
| | gtgtggtagaaattattctttctcatctcatatttgatcaagcttatttttcaaaagtttggccatatatggattcagaatattttgaaagtggtccagctaaaaatacattcaaattaattaaatctcatgt |
| | taatgagtaccatagcgttccatctattaatgcgttaaatgttgcattagaaaatagttcatttactgaaacagaatattctggtgtaaaaacacttatttcaaaactagctgattctccggaagacc |
| | acagctggttagtaaaagaaacagaaaaatatgttcagcaaagggcgatgtttaatgctacgtctaaaataatcgaaattcaaactaatgctgagcttcctccggaaaaacgaaataagaaaa |
| | tgccggatgttggtgctattcctgacatcatgcgccaagcattatcaatttcatttgatagctacgttggtcatgattggatggatgactacgaagcacgttggctatcttatatgaataaagctcg |
| | taaggttccatttaaactcagaattctaaacaaaattactaaaggcggagctgagactggaacactgaacgttttaatggctggcgttaacgtcggtaagtcattaggattgtgttcattggcag |
| | cagattatttacagctcggacataatgttctttacatttcaatggaaatggcagaagaagtctgtgctaaacgtattgatgctaatatgcttgatgtttctcttgatgacattgatgatgggcatatttc |
| | ttacgctgagtataaaggaaaaatggaaaaatggcgtgagaaatctactctcggtcgtttaatcgttaaacagtatcctaccggtggagcagatgctaatacatttcgatcgcttttaaatgaatt |
| | gaagctcaaaaagaattttgttccaacaatcattattgtcgactatctaggtatttgtaaatcttgccgcattagagtttattcagaaaatagttacacaactgttaaagctattgcagaggaattgc |
| | gtgctctggctgttgaaaccgaaactgttctttggactgcagcacaggttggtaaacaagcttgggactcttccgatgttaacatgagcgatattgcagaatctgccggtcttccagcaacagc |
| | cgattttatgcttgcagtcattgaaaccgaggagctagcagctgctgaacaacaactcattaagcaaatcaaatcacgatatggtgataaaaacaaatggaataagtttttgatgggtgttcaaa |
| | aaggaaatcagaaatgggtagaaattgaacaagattctactccaactgaagtgaacgaagtagcaggttcacaacagattcaggctgagcagaatcgctatcaaagaaatgaatccactcg |
| | agctcagttagatgctttggcgaatgaattaaaattttag (SEQ ID NO: 422) |
| 11 | atgaaagaattttatatctctatcgaaacagtcggaaataatattattgaacgttatattgatgaaaacggaaaggaacgtactcgtgaagtagaatatcttccgactatgtttaggcattgtaagg |
| | aagagtcaaaatacaaagacatctatggtaaaaactgtgctcctcaaaaatttccatcaatgaaagatgctcgagattggatgaagcgaatggaagacatcggtctcgaagctctcggtatga |
| | acgattttaaactcgcttatatcagtgatacgtatggttcagaaattgtttatgaccgaaaatttgttcgtgtagctaactgtgacattgaggttactggtgataaatttcctgacccaatgaaagca |
| | gaatatgaaattgatgctatcactcattatgattcaattgacgaccgtttttatgttttcgaccttttgaattcaatgtacggttcagtatcaaaatgggatgcaaagttagctgctaagcttgactgtg |
| | aaggtggtgatgaagttcctcaagaaattcttgaccgagtaatttatatgccatttgataatgagcgtgatatgctcatggaatatattaatctctgggaacagaaacgacctgctatttttactggt |
| | tggaatattgaggggtttgacgttccgtatatcatgaatcgcgttaaaatgattctgggtgaacgcagtatgaaacgtttctctccaatcggtcgggtaaaatctaaactaattcaaaatatgtac |
| | ggtagcaaagaaatttattctattgatggcgtatctattcttgattatttagatttgtacaagaaattcgcttttactaatttgccgtcattctctttggaatcagttgctcaacatgaaaccaaaaaagg |
| | taaattaccatacgacggtcctattaataaacttcgtgagactaatcatcaacgatacattagttataacatcattgacgtagaatcagttcaagcaattgataaaattcgtgggtttatcgatctag |
| | ttttaagtatgtcttattatgctaaaatgcctttttctggtgtaatgagtcctattaaaacttgggatgctattatttttaactcattgaaaggtgaacacaaggttattcctcaacaaggttcgcacgtta |
| | aacagagttttccgggtgcatttgtatttgaacctaaaccaattgctcgtcgatacattatgagttttgacttgacgtctctgtatccgagcattattcgccaggttaacattagtcctgaaactattc |
| | gtggtcagtttaaagttcatccaattcatgaatatatcgcaggaacagctcctaaaccaagtgatgaatattcttgttctccgaatggatggatgtatgataagcatcaagaaggtatcattccaa |
| | aggaaatcgctaaagtatttttccagcgtaaagattggaaaaagaaaatgttcgctgaagaaatgaatgccgaagctattaaaaagattattatgaaaggcgcagggtcttgttcaactaaacc |
| | agaagttgaacgatatgttaagttcactgatgatttcttaaatgaactatcgaattatactgaatctgttcttaatagtctgattgaagaatgtgaaaaagcagctacacttgctaatacaaatcagc |
| | tgaaccgtaaaattcttattaacagtctttatggtgctcttggtaatattcatttccgttactatgatttacgaaatgctactgctatcacaatttttggtcaagttggtattcagtggattgctcgtaaaa |
| | ttaatgaatatctgaataaagtatgcggaactaatgatgaagatttcatcgcagcaggtgatactgattcggtatatgtttgtgtagataaagttattgaaaaagttggtcttgaccgattcaaaga |
| | gcagaacgatttggttgaattcatgaatcagtttggtaagaaaaagatggaacctatgattgatgttgcatatcgtgagttatgtgattatatgaataaccgcgagcatctgatgcatatggaccg |
| | tgaagctatttcttgccctccgcttggttcaaagggtgttggtggattttggaaagcgaaaaaacgttatgctctgaacgtttatgatatggaagataagcgatttgctgaaccgcatctaaaaat |
| | catgggtatggaaactcagcagagttcaacaccaaaagcagtgcaagaagcactcgaagaaagtattcgtcgtattcttcaggaaggcgaagagtctgtccaagaatattacaagaacttc |
| | gagaaagaatatcgtcaacttgactataaagttattgctgaagtaaaaactgcgaacgatatagcgaaatatgatgataaaggttggccaggatttaaatgtccgttccatattcgtggtgtgct |
| | aacttatcgtcgagctgttagtggtctgggtgtagctccaattttggatggaaataaagtaatggttcttccattacgtgaaggaaatccgtttggtgataagtgcattgcttggccatcgggtac |
| | agaacttccaaaagaaattcgttctgatgtactatcttggattgactactcaactttgttccaaaaatcgtttgttaaaccgcttgcgggtatgtgtgaatcggcaggtatggactatgaggaaaaa |
| | gcttcgttagacttcctgtttggctga (SEQ ID NO: 423) |
| 12 | atgaaactgtctaaagatactactgctctgcttaaaaatttcgctactattaactctggtattatgcttaaatccggtcaatttattatgactcgcgcagttaatggtacaacttatgcggaagcaaat |
| | atttctgacgttattgattttgatgtagcgatttacgatttgaacggttttctcggtattctgtctctagttaatgatgatgcagaaatttcccagtcagaagatggaaatattaaaattgctgatgctcg |
| | ttcaacaattttttggccagcagccgatccgagtacagtagttgctcctaataaaccaattccattcccggtagcatctgttgttactgaaattaaagctgaagaccttcaacaactgttgcgtgta |
| | tctcgtggtctgcaaattgatacaattgctatcacggtaaaagaaggtaaaatcgtaattaacggttttaataaagtagaagattctgctctgacccgtgttaaatattctttgactcttggtgattat |
| | gatggtgaaaatacatttaatttcattatcaatatggcaaatatgaaaatgcaaccaggaaattataaacttctgctctgggcaaaaggtaaacaaggtgctgctaaatttgaaggtgaacacgc |
| | gaattatgtagtagctcttgaagctgattctacccacgatttttaa (SEQ ID NO: 424) |
| 13 | atggaatattcaactggacagcatctattaactattcctgaaataaaacgatatattctgagaaataatttttctaatgaagagcatatagttactgaatctatgcttaggaatgcatttaaagcaga |
| | atatacaaaaataatgtccaatagaaatgaagcttggactgttactgattattatgactaaaggtgtattatgactaaaattactgtgaattatactgttgatgtaaaagatattcagccaaaacacg |
| | tgcgttctgaatcaaatccacaaaaccaaaataaaattcgtcgagcatgggttttgtctctttctgataacgcaatggaagttattcagaacaaaattaaatctgcacctgctcgtcatgcgtatta |
| | tgaagctatcgatcgtgaagtaagtaataaatggattgaactaatgcgcaaacatactacagaatccctaaacgccggtgctaaatttattatgacttcatgtggtgaacgccttgaagatgatt |
| | attgcggtaatgcagatgaacgtctaattgttgctgctcaaattgttgcggaaacaattgcggctgattttaatcgttaa (SEQ ID NO: 425) |
| 14 | atgaaagtatgtatttttatggctcgaggtcttgaaggttgcggtgtaactaaattttctcttgagcaacgtgattggtttattaaaaatggtcatgaagtaactttggtttatgctaaagataaatcatt |
| | tactcgtaactgtgcgcatgattataaatcattttcaattccggttttattggcaaaagaatacgataaaacacttaagctggtaaatgattgtgatattctaattatcaattcagttcctgctacttcag |
| | ttgaagaagacactattaataactataaaaaaattattgataacattaaaccttcggttcgtgttgtagtttatcaacatgaccattcttctctttctttgcgtcgaaatttgggattagaagaaactgtt |
| | cgtcgagctgatgttatttttagccattctgataatggtgattttaataaagttctgatgaaagaatggtatccagaaactgtttctctgtttgatgatattgaagaagcgccgacagtatataactttc |
| | agcctcctatggatattgcgaaggttcggtcaacctactggaaagatgtttctgaaattaacatgaatatcaaccgttggattggtcgtacgactacatggaaaggtttttatcagatgtttgatttt |
| | cacgaaaaacatcttaaacctgcaggactaagtactattatggaaggtctggaacgttctccagcgttcattcctattaaagaaaaaggaattccatacgagtattatcgtcttcatcaagtaga |
| | ccaaattaaaattgctcctaatttaccaacgcaaattcttgaccgttatgtaaatagcgaaatgcttgaacgcatgagtaaatccggatttggttatcagttgagtaagttggacaaaaaatatcta |
| | caacgttctttagaatatactcatctcgagcttggtgcatgtggaacaattcctgttttctggaaatcaacgggtgataatttaaaattccgtgttgataatactcctttgacctcgcatgatagcggt |
| | atcatttggtttgatgaaaatgacatggaatcaacattcgagcgtattaaagaactgtcatctgaccgaactctttatgaccgcgaacgtgaaaaagcatatgaatttttgtatcagcatcaagatt |
| | caagcttctgctttaaagaacagtttgacattattacaaaataa (SEQ ID NO: 426) |
| 15 | atgactattcaaattaaaaacgccatcaattcttacgcatatgataaagtagtttctttgttagaaaaaggcgatattgtaactcctcaaattttggataaatgggaaaaagagcttcatcagacga |
| | tgaaacagaatgatcagaagattggacgcaatactgtccgtgaattgttggttcaatatatcttgtcagaatttgatgttaaagcttttggtgtagaatctaaagcttatcaaaagcatgaaatttcc |
| | gataaaactattcgtcgcatgaaaaatcaacgcaagaaaaaatttgcagacctgaaaattactaaggtataattatgaacgaagctcttattaacgatttgcgtcttgctggatatgaagtaaata |
| | caaatggcattggtttaattcaaattgaaggaaacggattcatccttgagtatgaatttagccaatggtggttatacgctaattacggtgaattaattgaatatgttgaccaatttgattcactagatg |
| | cagctcttggagcggctaagctgatgaattcttga (SEQ ID NO: 427) |
| 16 | atgttattgactggcaaattatacaaagaagaaaaacaaaaattttataatgcacaaaacggtaaatgcttaatttgccaacgagaactaaatcctgatgttcaagctaatcacctcgaccatga |
| | ccatgaattaaatggaccaaaagcaggaaaggtgcgtggattgctttgtaatctctgcaatgccgcagaaggtcaaatgaagcacaaatttaatcgttctggcttaaagggacaaggggttg |
| | attatcttgaatggttagaaaatttacttacttacttaaaatccgattacacccaaaataatattcaccctaactttgttggagataaatcaaaggaattttctcgtttaggaaaagaggaaatgatgg |
| | ccgagatgcttcaaagaggatttgaatataatgaatctgacaccaaaacacagttaatagcttcattcaagaagcagcttagaaagagtttaaaatgacaattgaaaaagaaattgaaggattg |
| | attcataaaactaataaagaccttttaaacgagaatgctaataaagattctcgtgtttttccaactcaacgggaccttatggctggtattgtgtctaaacacattgccaaaaatatggtcccgtctttt |
| | attatgaaagcgcatgaaagcggaattattcatttccatgatattgattattcccctgctcttccatttactaattgctgtttagtagatttaaaaggaatgcttgaaaacggatttaagcttggtaatg |
| | cacagattgaaactcctaaatcaattggcgttgctactgcaattatggcacaaattactgcacaggttgcttctcaccaatacggcggaacgacttttgccaatgtagataaagtactttctcctta |
| | tgttaaacgcacatatgcaaaacatattgaggatgcagaaaaatggcaaatcgctgatgcgttgaattatgctcaatctaaaacagaaaaagacgtatacgatgcattccaagcttatgaatat |
| | gaagtaaatactctctttagttcaaacggacaaacgccttttgtaacaattacatttggtacgggaactgactggactgaacgaatgattcagaaagcaattctgaaaaatcgcattaaaggtctt |
| | ggccgtgatgggataactcctattttccctaagcttgttatgttcgttgaagaaggtgttaatctttataaagacgatccgaactatgatattaagcagcttgctttagagtgtgcaagcaaaagga |
| | tgtatcctgatattatttcagctaagaacaataaagctatcactggttcatctgttcctgtttctccaatgggttgccgtagtttcttgggcgtatggaaagattcgactggcaatgaaattcttgatg |
| | gacgtaataatcttggtgttgtaacactgaatcttcctcgcatcgcgttagattcttatattggaacacagttcaatgaacagaaatttgttgaattgttcaatgaacgaatggatttatgttttgaag |
| | ctttgatgtgtagaattagttccttaaaaggagttaaagctactgttgctcctattctttaccaagaaggtgcattcggggttcgtcttaaacctgatgacgacataattgagttatttaaaaacggta |
| | gaagttcagtgtctttaggatacattggtattcacgaattgaatattcttgtcggtcgtgatattggacgagaaattttaactaaaatgaatgctcatcttaaacagtggactgaaagaaccggattt |
| | gcttttagtttatattctactcctgctgaaaacctttgttatcgcttctgtaaactcgatacagaaaaatatggaagcgtaaaagatgttaccgataaaggctggtacactaacagtttccatgtttca |
| | gtagaagaaaatattactccgtttgaaaagatttctcgtgaagcgccatatcatttcattgcgacaggtggtcacatttcttatgttgaacttcctgatatgaaaaataacttaaagggtcttgaggc |
| | cgtatgggattatgctgcacaacatttagattattttggtgttaacatgccggtagataaatgttttacatgtggaagtacccatgaaatgactcctactgaaaacggatttgtttgttctatttgtgg |
| | agaaactgatcctaaaaagatgaacacaataagaagaacgtgtggttatttgggaaatccgaacgaacgtggatttaatctcggcaaaaataaagaaatcatgcatagggttaagcatcaat |
| | gaattatgatagattttatccttgcgattttgtgaatggccctggttgcagggtcgttcttttcgttacaggttgtttgcataaatgtgaagggtgttataataaatcaacatggaatgctagaaatgg |
| | tattccattcactggtgaaacactagaacaattaattgaatgtttgaataatgattatatagaaggattgactataactggaggagaccctctctatccggataatcgagatgtcattcattgcattg |
| | ttcaaacagtaaaaaatctttatcccaataaaagcatttggttgtggacaggatataagtttgaagatattaaacaactagaaatgcttaaatatgttgatgttattattgatgggaagtatgagaaa |
| | aatcttccgactaaaaagctgtggcgaggatcagataatcagcgactttggtcaaataccgatggggtgtggaaacatgattaaattgaattacattatggatactataaatgatatgatttttcat |
| | tttggtccagaattttattcccaatatagtttagtgcttatcaatgcttggttaattaattaagggtaaaatatgtataaatttcgtaaaggtttagctgattttcttacaactgtaacattctttctgtttatg |
| | gcagttggagctattttccttattccttttattgctatatttttcgtgattagtttaatttctccagaaaagggcttatcttccagtgagttcaatgagcgcctggataaaattactaacaagctgaatgct |
| | gctcttagtaaggaatagttgtgaaacaaaataagattgaagtctatggaattccagatgaagtaggtcgttgtcctggatgtcaatcagttacaaaacttctaaaggagctcaatgctcctttta |
| | ctttctataaagttcttacaaataatggtaagattgagtatgatcgtccactgattgtatctcttgctaaacgcgctggattcacatctcttaacattcgttatccagtcattttcattaatgattctagac |
| | aaaagaacattaaacacttcaaagaaactctcatttcacttggatatgatagagatatcatagaagattaa (SEQ ID NO: 428) |
| 18 | atgaaacagttgataattaaaagattgaatttattgatatgttgtttatgtatagtaattgcatatggttattacgcaattaatgattatatgcattataaagattatgatgttactgtagttaataccctta |
| | caggaactcaaggaaaggggtctagtttatcgtttattgccgtatatgaactcaaagacggttatagatttagcgaatatatttcgccagagatgtattcatcaatagaaaaaggcgataattact |
| | gtaagtttacgtcctttcgacgtaaaacagacattgtttgataatattgtttggttctttggaatggtattagttcaatctatatgtggtacttatatagtctgttcaatcttattccgcgtaattagtaaaa |
| | ttgagtgaggaaaatatgtcagtagtaattaataatgtcaatgcagtaattaaatctttagttaataaaaaaatgatgaatgaatggactgtacttcgtcgtggagagccagataaattttttcatag |
| | atttaacccaactttggatttgaatgttattgacagagatgttcatgctgaaattttagataaatttaaagttgatattggatttggattagaaaaacatttacagcgaacaaacgggtctggaatga |
| | gtttatctaatcgcatcatgaaagcccttaataaaattggagcattgtctcgtattaacgcgagtgaaatccttcgtaattataataaaggatatgacctttatggccgactaatgccgaaattatca |
| | ttcgatcaaatgattgcggatttgtgggaaaatcaacgacgattattagcattaggcgctcgattagctaaaggtctagataaacaaatgatttttaaaactaataatacagaagaccttaaatgc |
| | tttaaatttagtactcgtggagatgattattacgtcagagctcgctctacagattatgtcaatatggggcatcatctctgtttagcttttgaagttttaaaagaagctTgaacgttagaatattcatct |
| | ggtgctaaatgcccgattggttcaaattgcattttaatttatcgcccgaatgaatccagttcaactaaattgcctacaaaacctgtaccagttcgtagtaacgaaaaacattctgaacaaattgatt |
| | attttaataaacagattgaagagctgaatatttctattcaacaatatgacgatgaaatctttagactatctggattgagtagtaaagctaaatctgaacgtgaaaaattaattaaaattgttgatttact |
| | taaatcttaaggaacaccatgaaaactcgttctcaaattgaagatatggttcgtaatgccagctatactcgtgatgctatgacatttttgtgtgaaaataatttagaccttaataaagttaattgttcc |
| | attcacgcctttaaacatctgaacagcagtgaatgggtgcgtaattttaatgaagcagggtatattacacaaatgactgctcgtgagcagctcgttgatttctgtaaaactattgattataaaaatc |
| | ctctatttgttcaaggcgttggtcagagtaaggttgatttatcaacaggattttttaatccaaatcattatcgtcttgaatggagatttattgctctattccgtaaacaattaaagcaaattttgtcgact |
| | gctagtcgattaaaaggttctgatattaacttaaagaatctgaaatttgatggttatactcttcagatggaagtaagaccattaaaagaaaataatagaactgcacgaattagctttaaacctaata |
| | caaaaaattctctttcaatttgtgaatgccttaaatcacagttgatagaagcatttaagtatatggatgttgttgctagtgttcagtctaagatttcacagcatttcgaacgatttaaattaggcacaac |
| | aacgtatgaacttgatatggtcgttttatttaaatacgattttttgagaaaggacgaagttgtacaagagaaaaagcaggaagtgcaagataacttaaatttatctaattacttatcaaacgatccta |
| | aattttggatgtatagttcaggtaataaagatgcatggaaattcaataaagtgaattttcttcctattgaaaatccgagtcttaaacctgttgaaaaatggcacgcggatgcgattgagaagtctat |
| | caaggcagtagatgatgaactcgttaaagcaactaatgaagtgttagaagctgaaaagatgctagaaaaagcacaagaaaaagtcaaaaatctcacgaagcaacgttctaaactgaacaat |
| | gcactaaatgcactgaactag (SEQ ID NO: 429) |
| 19 | atgaacgctaaagatattttcaacctggtaaattacaacgatggtaaatttaaatctgaagcacaaagcaagttctttaatgacatctcaatcggaggtgaaatcacagttgatggaggacaaat |
| | ttacaaatcccgttggaattggatcgttattatcgatgagattggtattgtagaaatttacaaaaatacgaataaaaatcgtacattacactggtctcgtgatactaacgaacagtacaaaaagga |
| | taaagcatctaagttatctcgtgtaactcaagaagatattgagttcatcaagaaagatattttgatgtatgataacttaattgctgaagagcaagctgttattgataaatttgacgagattaaagcttc |
| | tcgtgaaattcctgattttatgaaagaatcagtaaatgaacgatacactctcatttcagagcgtattgaaacttacaaaaagcaaagagctgaacgccaaaatactcttcggaagtttgaagaac |
| | ggttaaagacggtactcgcataa (SEQ ID NO: 430) |
| 20 | atgttatactcaaaggctcgtgaaatttacgaaactaagattaaagaagctgtatttcaattcgcaacaacgatgcgatggacaaatgattgggaatattcaaaaaatcataagaagcccctgg |
| | tgacaagaaaggctcatatgttagtgttaatagaccgtgagcagattaaagcccgagaagccctccagaatcataaaaaggctgcctttgaatggtttatggataacactgctcctgagacta |
| | agaaagcagtgagcgcgtggttcagtggaaaaaattgtgaaagaagtttcttttag (SEQ ID NO: 431) |
| 21 | atgaaagttttgtttgttgtgtatgtgatgattcaatataattacccaatgtttacttataatttggtgaataacattattgatatgattcagaggagtatgtaattatgagtgagtcgaagagaatcaat |
| | atgaaacgattagtattagaagatagtgtgctttttggtgaattagcgatcgaaaaagtaaataacatgtatcgtttgacgcaagaagatgatatgttatattacgcctagtgaaattgttcgtttaa |
| | cccaaattgaatatgcttacactgataaaattgtaagcattaatgatgagcataaaattcatttttattcttcatgcccaggatttaatattaaaagcgagtcaatgtgcttatcaattaataattggga |
| | taattttataactaacattaaatatttttatgattctactaaaagaaaacataatttaaaatggtttaaaaatgtaatgctattattactaactcctgtaatcagaatgatgaaactattttaaatgtttcaaa |
| | atgctatgaagagggagatgtagtatctattcgtcaaattgacgattttcgatcgcatatcattacattaaacaaagacgaagctattgcactaaagacttatcttgattctgttattccaactatgat |
| | ttcaaagtgaggaaatatgtttatttcaagtggaagtggtttaattcgtgttgaatttaaaaatgacatcttccttagtcaaggagatgatattattaaaatgagttatgacgaaatcaagaaaatttg |
| | tcatactcttgaaagccgtggaaaagtaaatgctgttttgacattggtgatttatgggtaacgctttatgaagtatccgaaggatttaacattgaagatgaaaataacattttagctattgataaaag |
| | aactgatttgcttgatgtattaaaagcctatgaacagtcaaacggtggaagaaaagctgtattgatttatcaaaaaccgcattcatgtggaactgcttcaatcatttcaaatattgaaggcgaagtt |
| | gatacttatatgtgttttaaaagctggtggtgaccgtcatccggattttatttctattcgtcaaaacaatggagaaatttcattatcaaaatcagaagctgaagctatgattaagtatttaacaaccgt |
| | tacgccttcaatgaaaggataattatgattattaatgaaaactcttggcactataaattattcaaactgtttaacgatgaatggcaacgacctaagacactatgcgcatatttttggtctattgcctcc |
| | tacatttttcgtttctatttttgggtgtgctatactcgtagggctaacaattatttgtgcagaaagcctacaacgttggcttattttcggtagtttatggactcttcttccatcggcatttatacttgcgcttt |
| | tggttgttttacttattatcggttcatttgttattcctgcacatttgcgtgaaaaatataaagattataaatggaaaaaggattatgctttacacgtagaaaatattgatagggcgtataaaggtttacct |
| | cctattcaacctaagaaatcgattatcgttgaatttttaaaagttcgtaaagctaaagtatgtcctgttattgaatataaggctgaatgatgaaaacagtaatgaaaagctattttggtagtcatcttta |
| | tggaacttctaccccagaatctgatgtagattttaaagaaatttttgttcctcctgctcgcgatattcttatcggaaatgtcaaagagcacatgagcaaaaacactaacaacacatcatctaaaaa |
| | cactaaagatgatattgaccatgaactatacagtcttaaatatttctttaaattagcagcagatggtgaaactgtagcgttagatatgcttcacactcaacctgaactagtggttaaatctgatttgc |
| | ctgatgtgtggaagtttattcaagacaaccgttctcgtttttatacgactaacatgaaatcatatttaggatatgtccgtaagcaagcttctaaatacggtgtcaagggttctcgtttggctgcattac |
| | gtgatgtattgaaagtagttaatcaaatccccgagcaatgggttgattaccaagaagatggttctattaagcagcgtcgtactaaagttgaagatattaagcatcgtcttccagaaaacgaattct |
| | gtgaatgggtgttccataatcatgagaaaacaggcccacaaacgttctacactgtattgggtcgtaaatatcagacaacgctttctcttattgagcttaagcagtcactgaacaaattagatgct |
| | gaatatggtgaacgtgcccgtaaggccgaagccaacgaaggcattgactggaaagctctgagccatgcttgtcgtggtggacttcaactattggaaatttacaaaactggtgacttggtttat |
| | ccacttcaagacgctccatttattctcgacgtgaagttgggtaaacatccatttaaaacggttcaagagtttttggaagatgtggtcgatcaagtagaagcagcatctactgaagcttctaagaa |
| | cggtatgcagcaaaaagtagacatgggtttctgggatgacttccttgagaaggtttatcttgaaaaccaccgaagttattataaatga (SEQ ID NO: 432) |
| 22 | atgctacaattaactgaaaagcaacttcgcaatcttactgtgcttcaattagatgaaattcgtagggaagttggaaatatcatttcagctttgcgtcgagaagtatcacttaaccaatctccggca |
| | gactatactagattgcgaaattttgaaaaataccttgataaagttaaggccgtgcatcggcataaagtaaatacaggacaaaaatgataggaggcctttatggccttaaaagcaacggtactat |
| | ttgccatgctaggattgtcatttgttttatctccatcaattgaagcgaatgtcgatcctcattttgataaatttatggaatctggtattaggcacgtttatacactttttgaaaataaaagcgtagaatcg |
| | tctgaacaattctatagttttatgagaacgacctataaaaatgacccgtgctcttctgattttgaatgtatagagcgaggcgcggagatggcacaatcatacgctagaattatgaaaattaaattg |
| | gagactgaatgaaattcagcgacttttcacaaagtggaaaaccttcaaaggcagatgaatacttaggtttattaatggctgcacaagcttattttcattctgcacattttgaaactaaaagttatgct |
| | agacacaaagcatacgattttattttttccgagttgccagatttgattgataaattttgtgagcaatatttggggtattctggtagaaaatacacaccttcaattccagatgccagtaaacttcctacc |
| | gacacaattaaaatgattgatcgcatactagaccaatctaacagcatttataaagaaatgcctccagccatccaaagcacgatagatgatattactggaatgttttaccagagtaagtatcttcttt |
| | ccctcgaataa (SEQ ID NO: 433) |
| 23 | atgaaaacctatcaagaatttattactgaagcagctattaattctcaaattattgctgaatcttttactgatcttttgaaatttaaaaaaggtcagaaaatcactgctgtattggatgatggtacagaa |
| | gttgagatggatgtacagggatataattatgcagtagatggaaaactgtataataaatctcatgctaaatttgattcatttgacgactttgttaatacagttgaagatgaaaaaactcgtcgatccat |
| | tgcaactggtgatgctaaggttcttatggcacatggtcatgaacgcattcgcgctaaacagaataaaatgggtgaagataatttcgcattagttggttatcaatctggtaaacaaacttatggcta |
| | tcaacgtactgctaccatgtataacaaaaatggtaaaattgcctttgtgaatagtaaaggttctattcagtacgttaaatcgttcaaataacatgggaacaacctggacctcatgattctgtgagg |
| | gattcccgccaacctgtaataatgtcgagcccaagcgcggtaatgggtaaatacagaaatggacaattcatgcgccatggaatggcccaaatttagagagaagaaatgagaacatttttaac |
| | tggtccttatctatccctgatgaatgcttttacacaccattctgatgctagagtagaagaaatttgtaaaaacgaatatcccgccatttgaagacttacttaaacagtattgcacacttcgactagat |
| | ggtggacgtcaatctggtaaatcaattgctgtgactaactttgctgctaattggttgtatgatggcggaacagttattgttctttctaatacttcagcttacgctaaaatttctgcaaataacatcaaa |
| | aaggaattttcgcgttattctaatgatgatatacgttttcgtttatttactgattctgtgcgcagttattggtaataaaggaagcaagttcagaggtttatcgctttcgcgaattttgtatataattgatga |
| | gcctgtcaaatctcctgatatggataagatttatagtgtccatattgacactgtacactgctgctgtaatattaaatgttgtattggtggtattactcgtccacagtttttcgtaatcggaatgcaatga |
| | tgacagacactcagcttttcgaatatctttatttttcgccaaaaactattaaaaataaattggtgaatcattttgaaattttggcaaaaaataacattttaagcgaattttatcctaagcaatacaaatta |
| | caaaaaggcgtattcaaaggatgcagagttttgtgtactgctcctaatgcacggctaatgaataaaattccatattttaccatggaatttattgatggaccttttaaaggattaattacccacagttt |
| | aatggcatatgattctgagccatttttaattaaagaacaatcttggataaatttattttctaattgaggtttatatgaaagcatatcaaattcttgaaggcacacataaaggtactatttattttgaagat |
| | ggtattcaagcacgaattattgtctctaaaacctttaaagaggactcttttgtagacccagaaattttctatggtttgcatgcccgtgaaattgaaattgagccacaacctacagttaaaattgaag |
| | gtggtcaacacctgaacgttaacgttctgcgtcgtgaaactctggaagatgcagttaagcatccggaaaaatatccgcagctgaccatccgtgtatccggttatgcagttcgctttaactctctg |
| | actccggaacagcagcgcgacgttatcgctcgtacctttaccgagagtttgtaatggcaaagataattattgaaggttctaaagatgtgataaatgctttcgccgagtggtttagtaattcaggc |
| | gaacagcaatttaatgaagcctggaatatgggtgatattgatggaatttatcctacgacagaagtttctgttcagggatatggcattcatgaacctattcgtttagttgaatatgatttatgtactggt |
| | gaggaagtcaaatatgattgaagatattaagggataaaccacatactgaagagaaaatcggtaaagtgaatgctatcaaagacgctgaagttcgtttaggacttatctttgatgctttatatgat |
| | gaattctgggaagcactagataattgtgaagactgtgaattcgcgaagaattatgctgaaagcctcgatcagttaactattgctaaaacgaaactcaaagaagccagtatgtgggcttgtcgtg |
| | cagtgttccaaccagaggaaaaatactaatggatcaattaagcgcagggtttggttatgagtattatactgcacctcgtcgtgtatctgttgctcctaagaaaattcaaagtcttgatgacttcca |
| | ggaagtagtccgtaacgctttccaggactatgcacggtatcttaaagaagattcgcaggactgtctcgaagaagatgaaattgcttactatacgcagcgtcttgaacagctcaaaaatctacat |
| | gaggttcgtgcagaagtttcaaagtctatgaataaattgattagatttaaagaataa (SEQ ID NO: 434) |
| 24 | atgaatatatttgaaatgttgcgtatagatgaaggtcttagacttaaaatctataaagacacagaaggctattacactattggcatcggtcatttgcttacaaaaagtccatcacttagtgttgctaa |
| | atctgaattagataaagctattggacgtaattgcaatggtgtaattaccaaagacgaggctgaaaaactctttaatcaggatgttgatgctgctgttcgcggaattctgagaaatgctaaattaaa |
| | accggtttatgattctcttgatgcggttcgtcgttgtgcattgattaatatggtcttccaaatgggagaaaccggtgtggcaggatttactaactctttacgtatgcttcaacaaaaacgctgggat |
| | gaagcagcagttaacttagctaaaagtagatggtataatcaaacacctaatcgcgcaaaacgagtcattgcaacgtttagaactggcacttgtgacgcgtataaaaatctataa (SEQ ID |
| | NO: 435) |
| 25 | atgaacacactgaagaaaattgttgagtttattcgcactaaacttggttctgctatggctaaaaatctatctgttgaagaacagtatactgccgcagcagcaaaactgcttgataaaattaaagac |
| | ctaaaaactgcttctgttaaatctattaatgaagaaaaacgtattcgtgaacttattgttgaaaagaataaacaggctgaatcaaaagagcgtgaaattcgcaagcttctttccgaaggtcaagat |
| | gtaacaatgcatgctaaactcggtttgctatatcgtcgaacagctgaacagctgactactaaagctgatggttatgctgaaatgcgaattgaaatcgctaagaaagtagttgagttagatgatg |
| | ctcgccaagaacttgcagttaaattggaatatatccgtgaaactcgtgcagcaaatgcccttggaattagtactgctgatgatgtagttgaaattgcagcactgactaaggttgatattgaagat |
| | actcttgctcgagttgaaacctttaatggcaatatttctggggttgaaactacctctgccgatgttcaggaatatattaattctctgaaataa (SEQ ID NO: 436) |
| 26 | atgactactttaattatttggttcgacgaaaatgaagaaacatattgcgtgaacattggcgaaagcccaatgccagaatttgaatcttcagataaaaactcggttgtatcttgggctgaaggttat |
| | aaagcagcaaaaggcgatgttgaaatagtttacaaactatccggagtataa (SEQ ID NO: 437) |
| 27 | atggataattacggtgaactgttcaacttctttatgaaatgtgtttcagaagatttcggtcgtacagtgaatgatattaaagttatcggtcctgaccatccgatgtttgaaacttacgcagtaatggg |
| | taatgaagatggtcagtggtatactgtaaaggtcgtgattaacatgttcactgctgaaggttatgttaaactgtcttctaaagtttaccatgataacgacgaaatcgcagaagaatatttcaataat |
| | atgaaataa (SEQ ID NO: 438) |
| 28 | atgaaaggtaatgtttatttagtcgttcatgatttaacattctattttaatcataatgacactgttatttctgaacgtgtaattaatttgctttatcagcatgcagactatgtttatgtcgaaaacgaattta |
| | ggcattggcaatttctcaaaaatcgttcatttggtttagatggttacgaatactttgaacgtaaagaccttttagataaaattccattatctacacaataccaaaatcacaagtctttacataaatgcc |
| | ggctaattcgaaatgctgaatccgcgtatgaagcaattgatttatggcgtaaacgccgtgaacagattgatgctttaaaagaatattaa (SEQ ID NO: 439) |
| 29 | atgaatggctattggtggaaatcaacgggaaaatatgataagcgtggaagaaagggtcatgaatactgcatgtgccgtttcggtgataaaggaccatattcattaaataacatatattgcgcaa |
| | ctaataatcaaaatacaaaagatgcgagactaaatgatagatttcctccaaaatctaaaaattttaattttaatggtcgaaaacactcggcacagtccttagaaaaaatttctaaaaataatgcaa |
| | gtaccttaagcaaagatgagataactagacgattaaaaatattagaaaattttaatatggatgaacgaggttttattaaaaattatgcaaacgctataaatgttagccatactcaagctagaaagtt |
| | tttaaataaatattacataaaataa (SEQ ID NO: 440) |
| 30 | atgaaacgttgtgaattaattcgaaatgttgctattgcaatttctgcttccgcttttagtttttcaatgtttgttggatttatatgcggattattgactacagcagaaaatgtgttttcacttgtagtagcatt |
| | tttaattggtttaatcgctatcgttatggataaaatttctaaaggttaataatgattctttatgcgaaagtatcgtccgttgaaaatggatataaatatgatcaagatgcggctaaagccttgattgatg |
| | attatggcattttaacatgttttgaagttgaaaaggtttacattgaccgttcatcttctcaagttaaattagtgaaggaagaccgtaaatttaatacagtaaattttgatttctttattgaaacagaaaaa |
| | ggtcctcttgaatatgatattttcaagaatcctttgggtcttgaatgtattaaatatacttacattaatatggtgaacaaatgtatattcgtttaggcagcacaattcctaagggttacgtaattgatgtc |
| | actacctgggaaaatgatggtgataactataaaaccaaaacactgtttggcgtagaagagcatgagctccaacaatttaaatatcttttgaagaagtttaagagtcgtcattctagcactaaagc |
| | tgaccgttattgtggtaatgggttgttcagcgagcaagagctttttatatatgaatatttggttgaaggactgttctcagaccaactttatccagaattcattaaaaaggtctttgatatagaagttga |
| | ccttggtaataaatccgaagaagatgaagaacgtgtatttgacttattctttgtgaatggtaataagatatttgaaggcctcattgatattcttggtcatgcttctgaatactatgaatatgatttcttgc |
| | gtgtagttgaacatgtagaatttgcttatatcgaagaagaaattgttttgccgactgttaaaatggttgatttgctttaa (SEQ ID NO: 441) |
| 31 | atgaaaacatttaaagaatttatcaatgaagcggctgcgccaaagacattcgttattaatactcagacgagtcttgacgatgagtatgcagaggcaattctgaagtcacttgctaagaacggcg |
| | ttgaagtaatcgcctcggactttaagaaaggggcttccgagatgtttatttctataactaaaggatctaaagctaagatcaaatcatcattcggagttgctcgtaccgatcaaatcgacaatcatg |
| | actttaaacaaactggtgctaaacggcagaatacaattgcatcacgcggaataaaatag (SEQ ID NO: 442) |
| 32 | atgaaaactttcaaagagtttgctacaaaaactactattactgaatcttcccatggtatggaagtaaaacttggaatggctttagctgaagctgagcgtcttttctctcgtattaaagaacttgctgc |
| | tgttgatccttcatcttttaaaggagaccaaactaaagttaaagcgcttttagcattatgctctgatgcaggcgaaatcgctaagaacggttctaagatgaagaaacgattagaagatttaaaata |
| | a (SEQ ID NO: 443) |
| 33 | atgaaactaatctttttaagtggtgtaaagcgtagtggaaaagatactactgctgattttatcatgagcaattattctgcagttaaataccaacttgctggtcctattaaggatgcattggcttatgca |
| | tggggagtatttgcagcaaacactgactatccttgcttaactcgtaaagagtttgaaggaattgactatgatcgtgagactaatttaaatctgactaaattagaagtaatcacgattatggaacaa |
| | gcattttgctatcttaatggtaaaagcccaattaaaggtgtgtttgtttttgatgacgaaggaaaagaatcagttaatttcgtagcatttaacaagattactgacgttataaataatattgaagatcaa |
| | tggtcagtccgtcgtctgatgcaagccctaggtacggatttgattgttaataacttcgaccgcatgtactgggtaaaattatttgctttagattatcttgataaatttaactcaggttatgattattatat |
| | cgttcctgatacccgtcaagatcatgaaatggatgcggctagggcgatgggtgctacagtaattcatgtagttcgtcctggtcaaaaatccaatgatacacatattacagaagctggattgcca |
| | attcgtgatggcgatttagtaattacaaacgatggttctattgaagaacttttttctaaaattaaaaatacactaaaggtactataatgtctgaacaaactattgaacaaaaactgtctgctgaaatc |
| | gtaactctgaaatctcgcattcttgatacacaggaccaagcggctcgtctgatggaagaatccaaaattctgcaaggaactttggctgaaattgctcgtgcagtaggtatcactggcgatacc |
| | atcaaagttgaagaaatcgttgaagctgtcaagaatcttactgctgaatctgcagatgaagcaaaagatgaagaataatggaatttaaagacttttcaacgggtctttatgtagcagctaagtttt |
| | cagaattaacacttgatgcgctggaagaactccagcgctctttacgtgttcctaatccagttcctagagaaaaaattcattcgactatatgttattcaagagtaaatgttccatatgttccatcgagt |
| | ggaagttttgaagtagcttcttctggacatttagaagtatggaaaacacaagatggatcgactcttgtacttgtgctagattctgaatatctgcgctgtcgacacatgtatgcgcgggcattaggt |
| | gctacacatgattttgatgattacacaccgcatataacattgtcttataatgttgggcccctatcatttagcggtgatgtacaaattccggtcgtattagatcgtgaatacaaagagcctcttaaact |
| | cgattgggcagatgatttaaaataa (SEQ ID NO: 444) |
| 34 | atggcatattctggaaaatgggttcctaaaaatatatcaaagtatagaggtgaccctaaaaaaattacgtatagatcaaattgggaaaaattcttttttgaatggttagataaaaatccagaaatta |
| | ttgcatggggtagtgaaacagcagtaattccttatttttgtaatgcagaagggaaaaaacgtagatacttcatggatatttggatgaaagattcttctgggcaagaattttttattgaaataaaacct |
| | aaaaaagaaacacaaccaccggttaaaccagcacatctaacaaccgcagcgaagaaaagatttatgaatgaaatttatacatattctgttaataccgacaaatggaaagcagcacaatcttta |
| | gctgaaaagcgtggaataaaatttagaattctaacagaagatggattacgagctcttggctttaagggggcataatggctatttttcaaataattaatgaaagcactccccaagttccaaaggtt |
| | aagcaatcattaaacgaaaagaaatggattcagataggtcttgaatacaaaaaggccaaagcaaaaggaatgacaggaaagcaatttgctgaagaaagaggaatcaaatactctacgttta |
| | cttcagcaatgtcaaaatatgcttcaggaattaaaacggctgaaaagattcaaaaacttgaatcaaaaccaatgaataaactcaataagcaagaaagacaactgcttatgataaattcattcag |
| | acaaacattgcgtgataaaattcgtaatgaaggtgcagcaattaataataaaaccagaaagtggtttgccgaaactattaagcaagtaaaaggacataaagttgttcgcccgcagccgggac |
| | gaatatatgcttttgcttatgatgctaaacacaaggaaactcttccttattgggataaatttcctttgataatttaccttggtttaggtaagcataatttaatgtacggattgaacttgcactatattccac |
| | ctaaagctcgtcagcaatttctagaagagcttttaaagcaatatgcaaatacacctactattactaataaaacgaaattaaaaattgattggagtcaagtgaaaggatttagaggtgcagatcaa |
| | atgattaaggcgtatatacctggtaatattatgggtagccttgttgaaatcgccccgaaagactgggcgaacgttgtgttgatgccacttcagcagttcgtttcaaaaggaaaacgtttctctgc |
| | aaacaaagtctggtcaaatatctaa (SEQ ID NO: 445) |
| 35 | atgttcattcaagaaccaaagaaattgattgataccggcgaaattggtaacgcttctactggtgatatcttattcgacggtggtaataaaattaatagtgattttaacgcaatttataatgcgtttgg |
| | cgatcagcgtaaaatggcagtagcaaatggcactggagcagatggtcaaattatccatgctactggatattatcaaaaacactctattacagagtacgcaactccagtaaaagttggcactag |
| | gcatgatattgatacctctactgtaggtgttaaagttatcattgaaagaggcgaacttggcgactgcgttgaatttattaactctaatggatcaatatcagttactaatcctctaacaattcaagctat |
| | tgattcaattaaaggtgtttcaggtaatttagtagtaactagcccatatagtaaagttactttacgctgtatttcatctgataattctacatcggtttggaattattctattgaaagtatgtttggacaaaa |
| | ggaatcaccagctgaaggtacatggaatgtttctacatccggatcagttgatattccactatttcaacgcactgaatacaatatggctaaattgctagttacgtgccaatcagtagatggaagaa |
| | aaattaaaacagcagaaataaatattcttgtggatactgttaattcagaggtaatttcttctgaatatgctgtcatgcgagttgggaatgaaaccgaagaagatgaaatcgctaatattgcatttag |
| | tattaaagaaaactatgtaacggcgactataagttcttcaactgtcggtatgagagcagcagttaaagttatcgctacgcagaaaatcggggtggctcaataatgaaacaaaatattaatatcg |
| | gtaatgttgtagatgatggtaccggtgactacctgcgtaaaggtggtataaaaataaatgaaaactttgatgagctttattatgaactcggtgatggtgatgttccatattcagccggtgcctgga |
| | aaacttataatgcttcatcaggacaaacattaacagcagaatggggaaaatcatacgctattaatacatcttctggaagagtgactataaatcttccaaagggtacagttaatgattacaacaag |
| | gtaattagagctagagacgtatttgctacatggaacgtcaacccagttacactagtagctgcttccggcgatacgattaaagggtctgcagtaccagttgaaattaatgttcaattcagcgattt |
| | agaactagtgtattgtgccccaggacgttgggaatatgtcaaaaataaacaaattgacaaaattaccagttcagacattagtaatgtagctcgtaaagaatttttagtcgaagtccaagggcaa |
| | acagactttttagatgttttcagtggaactagttataatgtaaataacatcagagtaaaacatcgtggtaacgaattatattatggcgatgtgtttagcgaaaacagcgattttggctctccaggcg |
| | aaaatgaaggagaactggttcctcttgatggatttaatattcgattaagacagccttgtaatattggtgacactgttcaaattgaaacatttatggatggtgtatcgcagtggagaagttcatatac |
| | aagacgtcaaattagattgttagattcaaaattaacgtcaaaaacttctctagaaggaagtatttacgttactgatttatcaacaatgaaatcaattccattttctgcttttggattaattccaggagaa |
| | cctattaatcctaattctcttgaagttagttttaatggaattttacaagaattggctggaacagttggaatgccattatttcattgtgttggtgccgattcagacgatgaagtagaatgctctgttttag |
| | gtggaacttgggaacaatctcataccgattattcagttgaaactgatgaaaacggcataccagaaattttacatttcgatagagtatttgagcatggtgacattatcaatatcacctggtttaataa |
| | tgatttgggtacattattaacaaaagatgagattattgatgaaactgataatctctatgtatcgcaaggaccgggagtagatatttccggtgatgtaaatttaacagactttgataaaattggttggc |
| | caaatgtagaagcagttcaatcttatcaacgcgaatttactgctgtttcaaatatctttgatacgatttatcctattggaactatatatgaaaacgctgttaatccaaataaccctgttacatatatggg |
| | attcggctcatggaaattatttgggcaaggaaaagttttagttggatggaatgaagatatttcggaccctaactttgctctaaataacaacgatttagattctggtggaaatccttcgcatactgca |
| | ggcggaacaggtggttctacttctgttacattggaaaatgctaatcttcctgcaaccgagacagatgaagaagttctaatagttgatgaaaatggatcagtcattgttggtggatgtcaatacga |
| | tccagatgaatccggtccaatttatactaaataccgtgaagctaaagcatctactaactctactcacactccgccaacatcaataactaacattcaaccatatattacagtttatcgttggataagg |
| | attgcataatgagtttacttaataacaaagcgggagttatttcccgcttagccgattttcttggttttagacctaaaactggcgacattgatgtaatgaatcgtcaatcagtcgggtcagtgacaat |
| | atctcaattagcgaaaggattttatgaaccaaacatagaatcagctattaatgacgttcataatttttctataaaagacgttggtacaattattactaataaaactggtgtttctcctgagggtgtttct |
| | caaactgattattgggcattttctggaactgtaacagacgattctcttcctccgggttctcctgttacggtattagtatttggtcttccagtttcagcaacaactggaatgacggcaattgagtttgtt |
| | gcaaaagttcgtgttgcccttcaagaagctattgcatcatttactgctatcaactcatataaagaccatccaacagatggtagtaaattagaagttacttatttagataatcaaaaacatgtattaag |
| | cacatattctacatatggaataactatttcgcaggaaattatttctgagtctaaacctggctatggtacatggaatttattaggcgcacaaactgtaactttagataatcagcagactcctacagtat |
| | tttatcattttgagagaacagcatgagtaataatacatatcaacacgtttctaatgaatctcgttatgtaaaatttgatcctaccgatacgaattttccaccagagattactgatgttcaggctgctat |
| | agcagccatttctcctgctggcgtaaatggagttcctgatgcatcgtcaacaacaaagggaattttatttcttgccactgaacaggaagttatcgatggaactaataataccaaagcagttacac |
| | cagcaacgttggcaacaagattatcatatccaaacgcaactgaagctgtttacggattaacaagatattcaaccgatgatgaagccattgccggagttaataatgaatcttctataactccagct |
| | aaatttactgttgctcttaataatgtctttgaaactcgtgtttcaactgaatcatcaaatggggttattaaaatttcatctttaccgcaagcattggcaggtgcagatgatactactgcaatgactccat |
| | taaaaacacaacaattagctgttaaattgattgcgcaaattgctccttctaaaaatgctgctacagaatctgagcaaggtgtaattcagttagctacagtagcacaggctcgtcagggaacttta |
| | agagaaggatacgcaatttctccttatacgtttatgaattctactgctactgaagaatataaaggcgtaattaaattaggaacgcaatcagaagttaactcgaataatgcttctgttgcggttactg |
| | gagcaactcttaatggtcgtggttctacgacgtcaatgagaggcgtagttaaattaactacaaccgccggttcacagagtggaggcgatgcttcatcagccttagcttggaatgctgacgttat |
| | ccaccaaagaggcggtcaaactattaatggaacacttcgcattaataatacgcttacaatagcttcaggtggggcaaatattaccggaacagttaacatgactggcggttatattcaaggtaa |
| | acgcgtcgtaacacaaaatgaaattgatagaactattcctgtcggagctattatgatgtgggccgctgatagtcttcctagtgatgcttggcgtttttgccacggtggaactgtttcagcgtcaga |
| | ttgtccattatatgcttctagaattggaacaagatatggcggaagctcatcaaatcctggattgcctgacatgcgcggtctttttgttcgtggctctggccgtggctctcatttaacaaatccaaat |
| | gttaatggtaatgaccaatttggtaaacctagattaggtgtaggttgtactggtggatatgttggtgaagtacagaaacaacagatgtcttatcataaacatgctggtggatttggtgagtatgat |
| | gattctggggcattcggtaatactcgtagatcaaattttgttggtacacgtaaaggacttgactgggataaccgttcatacttcactaatgacgggtatgaaattgacccagcatcacaacgaaa |
| | ttccagatatacattaaatcgtcctgaattaattggaaatgaaacacgtccatggaacatttctttaaactacataattaaggtaaaagaatgacagatattgtactgaatgacttaccattcgttga |
| | cggccctcctgcagagggccagagccgcatttcctggattaaaaacggcgaagaaatattaggagctgacacgcagtatggaagcgaaggttcaatgaatagacctacagtttctgtacta |
| | agaaatgtcgaagttctcgataaaaacattggaatacttaaaacatctttagaaaccgcaaatagtgatattaaaacaattcagggcatcttagatgtatctggtgatattgaagctttggcccaa |
| | ataggtatcaataaaaaggatatttctgacctcaaaacgctaaccagtgaacatacagaaatattaaatggacctaatagtacagttgacaacattcttgctgatattggtccatttaactctgag |
| | gccaactctgtatacagaacaatcagaaatgatttactgtggataaagcgtgaacttggacaatacgcaggtcaagatattaatggtcttcctgttgtaggaaatcctagtagtggaatgaagc |
| | atcgcattattaataatactgatgccattacttcacagggaatacgtttaagcgaattagaaacaaaatttattgaatctgatgtaggttctttgactattgaagttggtaatcttcgtgaagagcttg |
| | gaccgaaaccaccatcattttcacaaaacgtttatagtcgtttaaatgaaattgacactaaacagacaacatttgaatctgacattagtgctattaagacctcaataggatatccaggaaataatt |
| | cgattattactagtgttaatacaaacactgataatattgcatctattaatttagagctaaatcaaagtggaggtattaaacagcgtttaaccgttattgaaacttctattggttcagatgatattccttc |
| | gagtattaaaggccaaatcaaagataatacaactttaatcgaatctctaaatggaatcgtcggtgaaaacacttcatctggtttaagagcgaatgtttcatggttaaacaaaattgttggaactga |
| | ttctagcggtggacaaccttctccttctgggtctcttttaaaccgagtttctacaattgaaacttctgtttcaggattgaataacgatgttcaaaacctacaagtagagattggtaataatagcgcag |
| | gaattaaagggcaagttgtagcgttaaatactttagtaaatggaactaatccaaacggttcaacagtcgaagaacgcggattaaccaattcaataaaagctaacgaaaccaacattgcatcag |
| | ttacacaagaagtgaatacagctaaaggtaatatatcttctttacaaagcggtgttcaagctctccaagaagccggttatattcctgaagcgccaagagatgggcaagcttacgttcgtaaaga |
| | cggcgaatgggtattgctttctacctttttatcaccagcataacatggggccgcaaggccccaaaggattttaaatgtcaggatataattctcagaatccaaaggaactcaaagatgtcattcta |
| | agacgtttaggggctccaattattaatgttgagttaacacccgatcaaatttacgattgtatccagcgtgccctagaattatacggtgaataccattttgatggactcaataaagggtttcatgtgtt |
| | ttacgtaggggatgacgaagaaaagtacaagaccggagtcttcgatttaagaggttctaacgtatttgcagtaactcgcattttacgcacaaatattgggtcaataacatctatggatggaaac |
| | gctacatatccgtggtttactgactttcttttgggaatggctggtattaatggcggaatgggaacgtcttgtaatagattttatggaccaaatgcctttggtgccgatttggggtattttactcaactt |
| | accagttatatgggaatgatgcaggatatgctctctcctattccagacttttggtttaattcagcaaatgaacagctcaaagtcatgggaaacttccaaaaatatgatttaattatcgtagaaagct |
| | ggactaaatcatacattgatacaaacaaaatggttggaaatacagtaggatatggaacagtcgttccacaagataactggtcattatctgaacgatataataaCccagacaacaatttagtag |
| | gtcgtgttgttggtcaagacccaaatgttaagcaaggtgcttacaataatcgttgggtgaaagactatgcaacagctttagctaaagaattaaatggtcaaattttagcacgccaccagggaat |
| | gatgcttcctggcggtgttacaattgatggacaacgcttaatagaagaagctcgattagaaaaagaagcactgcgcgaagaattatacttacttgaccctccatttggaattttggtaggttaat |
| | atggctacttacgataaaaatctttttgctaaattggaaaaccgcacaggttattctcagaccaatgaaactgaaatactaaatccttatgtaaatttcaatcattataaaaacagccaaatattagc |
| | tgatgtattagtagctgaaagcattcaaatgcgaggtgtagaatgctattatgttccaagagagtatgtttcccctgatttgatattcggcgaagacttgaaaaataaatttactaaagcttggaaa |
| | tttgctgcatatttaaattcatttgaaggatatgaaggagctaaatcgttctttagtaattttggtatgcaagtacaggatgaagttactttgtccattaatccaaacttgtttaaacaccaagtaaatg |
| | gaaaagaaccgaaagaaggcgatttgatatattttcctatggataacagcttatttgaaattaactgggttgaaccatatgatccattttatcaattaggccaaaacgctattcgtaaaattacggc |
| | aggtaaattcatttattctggagaagaaattaatccagttctacagaaaaatgaaggaattaacattccagaatttagtgaattagaattaaatcctgttcgcaatcttaacggtattcatgacatta |
| | atattgatcagtatgctgaagtagatcaaattaattctgaagctaaagaatatgttgaaccctatgttgttgtcaataacagaggcaaatctttcgaatctagcccatttgataatgatttcatggatt |
| | aa (SEQ ID NO: 446) |
| 36 | atgtttggttatttttataattcgtcttttagacgatatgctaccttgatgggcgatttgttttcaaatatccaaatcaaacgtcagttagaatctggtgataagtttatacgtgttcctattacatatgcat |
| | caaaggaacactttatgatgaaattgaataaatggacatcaataaattcacaagaagatgtagctaaagttgaaaccattctacctcgtataaatttacatttagttgattttagctataatgctccat |
| | ttaaaacaaacattttaaatcagaatttactgcaaaaaggtgcaacttctgtagtatcgcagtataatccatctcctattaaaatgatttatgaattgagtatctttactcgctacgaagatgatatgtt |
| | tcaaatagttgaacagattcttccatattttcaacctcattttaatacaactatgtacgagcagtttggaaatgatattccatttaaaagggatatcaaaattgtactgatgtctgctgctatagacga |
| | agctatagatggggataatttatctcgtcgtagaattgaatggtcattaacatttgaagtaaatggatggatgtatcctccagtagatgatgcagaaggattaattcgtactacttatacagattttc |
| | acgccaatacaagagatttgcctgatggcgaaggtgtttttgaatctgtcgatagcgaagttgttcctcgagatattaacccagaagactgggatggaacagtaaaacaaactttcactagtaa |
| | tgtaaatagaccaacaccgccagaacctcctggcccaagaacatagaggttattatggaaggtcttgatataaacaaacttttagatatttctgacctccccggaattgacggggaggaaatc |
| | aaagtatatgaacctctgcaattagtagaagttaaaagcaatccacaaaaccgtactcctgacttagaagatgattatggagtagttcgtcgaaatatgcattttcaacaacaaatgctaatgga |
| | cgcggccaagatttttcttgagacggcaaagaatgctgattctcctcgtcacatggaagtatttgcaactcttatggggcaaatgactacgacgaacagagaaatactgaagcttcataaagat |
| | atgaaagatattacatctgagcaggttggcaccaaaggcgctgttcctacaggtcaaatgaatattcagaatgcgacagtattcatgggttcaccaacagaattaatggacgaaattggtgat |
| | gcttacgaggctcaagaagctcgtgagaaggtgataaatggaacaaccaattaatgcattaaatgatttccatccgttaaatgaagctggaaaaattttaataaaacacccaagcttagcgga |
| | aagaaaagatgaagatggaattcattggataaaatctcagtgggatggaaaatggtatcctgaaaaattcagtgattaccttcgtctacacaaaatagtaaaaattccaaacaactctgataag |
| | cctgaattatttcaaacttataaagataagaataataaaagatctcggtatatgggtcttcctaacttgaaacgagctaatattaaaacacaatggactcgtgaaatggttgaggaatggaaaaa |
| | atgccgagacgatattgtttattttgcagaaacatactgtgctattactcatattgactatggtgtcataaaggttcaattacgtgactatcagcgtgatatgctcaaaataatgtcatctaaacgtat |
| | gactgtttgtaatctatcgcgtcagctcggtaaaacaacggtagtagctattttccttgcacactttgtatgttttaacaaggataaagctgtaggtattcttgcgcacaaaggctcaatgtctgcg |
| | gaagttttagaccgtactaagcaagcaattgaactgcttcctgactttttacagccaggtatagttgaatggaataagggttcaattgaactagataatggttcttcaattggcgcttatgcttcctc |
| | tcctgacgcagttcgtggtaactcgttcgcaatgatttacattgacgaatgtgcgtttattccaaacttccatgattcctggcttgctattcaaccagtaatttcatctggtcgtcgttcgaaaattatt |
| | attactacgactcctaatggattaaatcatttttatgatatttggactgctgctgttgaaggtaaatctggatttgaaccatatactgctatttggaattcagttaaagaacgtctttataacgatgaag |
| | atatttttgacgatggatggcaatggagcatacaaaccattaatggttctactttagctcaatttcgtcaagaacacaccgcagcgtttgaagggacttctggtacattaatttcgggaatgaaatt |
| | agctattatggatttcattgaagtaactccagatgatcatggttttcatcgatttaaaagccctgaaccagatagaaaatatattgcaactctagactgctcagaaggtcgtgggcaagattacca |
| | cgctttgcatattattgatgttaccgatgatgtgtgggaacaggttggtgttttgcactcaaacactatttctcatttaattctacctgacatcgttatgcgttatttagtagaatacaatgaatgccca |
| | gtttatattgaattaaatagtactggtgtgtcagttgcaaaatcgctttatatggatttagaatacgaaggtgttatctgtgattcatatactgatttaggaatgaaacaaactaaacgcacgaaagc |
| | agtaggatgttccacgctaaaagaccttattgaaaaagataagcttattattcatcaccgagcgactattcaagaatttagaacgtttagtgaaaaaggcgtgtcttgggcggctgaagaaggt |
| | tatcacgacgatttagtaatgtctttagtaatttttggatggttatcaacacaatcaaaatttattgattatgcggataaagatgacacgcgattagcatctgaagtattttcaaaagagcttcaagat |
| | atgagcgacgactacgcgccagttatatttgtggattcggttcattctgctgagtatgttccagtatctcatggtatgtcaatggtataaatatattaaagcatattaaagaggattaaaaatgacttt |
| | attatctccgggcattgagctcaaagaaactacggttcaaagcaccgtggttaataactctactggtacagcagctttggccggtaaattccagtggggtcctgcttttcagattaaacaggtta |
| | caaatgaagtagatttagttaatacttttggtcaaccaaccgctgaaactgctgactattttatgtctgcgatgaatttcttgcagtacggaaatgacttacgagtagttcgtgctgttgatagagat |
| | accgctaaaaactcatcaccaatcgctggtaatattgaatacacaatttctaccccaggtagtaactatgcggttggagataaaatcacagtcaaatatgtttcagatgatattgaaactgaagg |
| | taaaattactgaagtagacgcagatggaaaaattaagaaaattaatattcctactgcaaaaattatcgctaaagcgaaagaagtcggtgaatatccaacactaggttctaactggactgcgga |
| | aatttcttcatcttcctctggtttagctgcagtaataactcttggaaaaattattactgattctggtattttattagctgaaattgaaaatgctgaagctgctatgacagcggttgactttcaagcaaatc |
| | ttaaaaaatatggaattccaggagtagtagcgctttatccaggcgaattaggcgataaaattgaaattgaaatcgtatctaaagctgactatgcaaaaggagcttctgcattactcccaatttatc |
| | caggtggtggtactcgtgcatctactgccaaagcagtgtttggatatggaccgcaaactgattcacaatacgctattatagttcgtcgcaatgatgctattgttcaaagcgttgttctttcaactaa |
| | gcgtggtgaaaaagatatttacgatagtaacatctatatcgatgactttttcgcaaaaggcggctcagaatatatttttgcaactgcacaaaactggccagaaggcttctctggaattttaactct |
| | gtctggtggattatcatcaaatgctgaagtaacagcaggagatttgatggaagcttgggacttctttgctgaccgtgaatccgttgatgttcaactgtttattgcgggttcttgtgccggtgaatct |
| | ttagaaacagcatctactgtccaaaaacacgtcgtttcaattggggatgctcgccaagattgcttagtattgtgctctcctccgcgtgaaactgtagttggaattcctgtaactcgtgcagtagat |
| | aatttagttaactggagaactgcggcaggttcatacactgataataactttaatatcagttcaacctacgcagcaattgatggtaactataagtatcagtatgacaaatataatgatgtgaatcgtt |
| | gggttccattagcagctgatattgctggtttatgcgcaagaactgataacgtatctcagacttggatgtctccagctggttataatcgtggccagattcttaacgttattaaacttgctattgaaact |
| | cgccaggctcagcgcgaccgtttataccaagaagctatcaacccagtaactggtacaggtggcgatggttacgtattgtatggtgataaaacagctacttctgttccttctccatttgatcgtatt |
| | aacgttcgtcgtctgtttaatatgttgaaaacgaatatcggacgtagttcaaaatatcgtttgttcgaattaaacaacgcgtttactcgttcatcattccgcacagaaactgcccagtacttgcagg |
| | gaattaaagctctcggtggaatttatgaatatcgtgtagtttgcgatacaacaaataacactccgtcagtaattgatagaaatgagtttgttgcaacattctacatccaacctgcgcgcagtataa |
| | attatattactttgaatttcgtcgcaacggctactggtgcagatttcgatgagttaactggtcttgcaggttaa (SEQ ID NO: 447) |
| 37 | atgtttgtagatgatgtaacacgcgcgtttgaatcaggtgattttgcgcgacctaacttattccaagtagaaatttcttatcttggacaaaattttacgtttcaatgtaaagccactgctttaccagct |
| | ggtattgtagaaaaaattccagtcggatttatgaaccgtaaaattaacgtagcaggcgatcgtacattcgatgactggactgttacagtaatgaacgatgaagctcatgatgctcgccagaagt |
| | tcgttgattggcaaagcattgctgcggggcaaggaaacgaaattactggtggaaaacctgcagagtataaaaagagcgctatcgttcgtcaatatgctcgtgacgctaaaacagtaacaaa |
| | agaaattgaaattaaaggtctgtggcctactaacgtgggtgaacttcaattagattgggattcaaacaatgaaatccaaacatttgaagtaactcttgctctcgattattgggaataa (SEQ |
| | ID NO: 448) |
| 38 | atggctaaaatcaacgaacttctgcgcgaatcaaccacaacgaatagcaactcaatcggtcgcccaaatctcgttgctttgactcgcgctaccactaaattaatatattctgacattgtagcaac |
| | gcaaagaactaatcaacctgttgctgctttttatggtatcaaataccttaacccagacaacgaatttacatttaaaactggtgctacttatgctggcgaagctggatatgtagaccgagaacaaat |
| | cacagaattaacagaagagtctaaattaactctcaataaaggcgatttattcaaatataataatatcgtttataaagtattagaagatacaccatttgctgatattgaagaaagcgacttagagctg |
| | gctcttcagattgcaattgttcttttaaaggttcgtctattttctgacgcagcgtcaacaagcaaatttgaaagctctgatagtgaaattgcggatgctagattccagattaataaatggcaaaccg |
| | cggttaaatctcgtaaacttaaaactggcatcacagttgaattagcgcaagatttagaagcaaatggattcgatgctcctaatttcttggaagatttgcttgcaactgaaatggcagatgaaatca |
| | ataaagatattctgcaatctttgattacagtgtcaaaacgctataaagttacaggaattactgatagtggattcatcgatttgagttatgcgtctgcacctgaagctggtcgttcattataccgaatg |
| | gtatgtgaaattgtttcgcatatccaaaaagaatcaacttatacagcaacgttctgtgttgcttctgctcgtgccgctgcgattcttgctgcatcaggttggttaaaacataaaccagaagatgac |
| | aaatatctttcacaaaatgcctacgggttattagctaatggtttaccgctttattgcgatactaacagcccattagattatgtaatcgttggtgtagtagaaaatatcggtgaaaaagaaattgttgg |
| | atcaattttctatgctccgtatacagaaggtctcgacttagatgaccctgaacatgtaggcgcatttaaagttgttgttgatccagaaagcttacaaccgtctatcagtttattagttagatatgcttt |
| | atcagcaaatccttataccgtagcaaaagatgaaaaagaagcaagagtaattgatggtggagacatggataaaatggcgggtcgttcagatttgtctgttttattaggtgttaaattaccaaaaa |
| | ttattattgatgaataa (SEQ ID NO: 449) |
| 39 | atgagaactgaggttgtggtgtttactcttcatgagtctggaaagtcattcattgaaattgctcgtgaattaaacttacatgcaaaagaagtggctgtattatgggctcgagctatgactgctaag |
| | aataaatttgaaactcgagaaaaagttgtctatagaaaaagacatatcaataaaaaggtgaaaaatggaacagtatgaactttatgaaaatgaatcttttgctaatcaattacgcgaaaaagcat |
| | taaaaagtaaacagtttaagctagagtgttttattaaagatttttcggaacttgctaataaagcagctgaacaaggtaaaacatattttagttattatactgctcgcgataaattgattactgaagaa |
| | attggtgattggctgagaaaagaaggatttaattttaaagtcaatagtgatcagcgtgatggtgattggttagaaattacattttgaggattaattatgtttaaaaagtagcagtcttgaaaatcatta |
| | caactctaaatttattgaaaaactttacagcttgggattgactggcggcgaatgggtagctcgtgaaaagattcacggcacaaatttctcattgattattgagcgtgataaagtaacttgtgctaa |
| | acgtactggaccgattcttcctgctgaagatttctttgggtatgaaattattctaaagaattacgctgattccattaaagcagtacaagatattatggaaacctcagcggttgtatcttatcaagtctt |
| | tggcgaattcgctggacctggcattcagaagaatgttgattatggcgataaagatttttatgtatttgacattattgtcactacagaaagtggtgatgtgacttatgttgatgattatatgatggaatc |
| | attctgtaatacatttaaatttaaaattgctccacttttaggtcgcggtaaatttgaagagcttattaaattgccaaatgatttagattctgtcgtccaagattataattttacagtagaccatgctggatt |
| | agttgatgcaaataaatgcgtttggaatgccgaagcaaaaggcgaagtatttactgctgaaggatatgtattgaaaccttgttatccttcttggcttcataatggaaatcgtgtagcaattaaatg |
| | caagaattccaaatttagtgaaaagaaaaagtctgataagcctattaaagctaaagttgaactatcagaagctgataacaaattggtgggaattttagcttgttacgttacactgaaccgtgtaaa |
| | taacgttatttctaaaattggcgaaattggtccaaaggattttggaaaggtgatggggctaactgttcaagatattttggaagaaacttctcgtgaaggtattactctaactcaagcagataatcct |
| | tctttgattaaaaaggaattagttaaaatggtaagatgtacttcgtccagcttggattgagttggtgagctaa (SEQ ID NO: 450) |
| 40 | atgatagataaagattatattgcagagctgaaggctcttgatgataacaaagaagctaaagctaaattagctgaatatgctgaacagtttggtataaaggtcaaaaagaataaatcttttgataat |
| | atcgttgttgatattgaagaagccctccagaagctcgctagtgaacctatgccagagactgatgggttatctattaaagacttaattgatgctgctgatgccgcagagggattaaaatatgacg |
| | atgaagaagtcaatccagaagcagcacttctgattgattctccggttaaatctgacattaaaattgaagtagtagaaacggataaaattcctgaaaataccgatgttttgattgaagatactccttt |
| | tgttgaagaaaagtttgaacaagctgtagctgagattattgaatctgaaaagccgtctgtatttactcttccggaaaactttagtccgaatcttcagctgattggaaaaaatccaggattctgcact |
| | gttccttggtggatttatcaatggattgctgaaactccggattggaaatctcacccaactagttttgaacatgcgtcagcacaccaaactttatttagcttaatttattacattaaccgcgacggatc |
| | agttttaattcgtgaaacacgcaattcttctttcgtaacattaaaataaggataacttatgacttttacagttgatataactcctaaaacaccgacaggggttattgatgaaaccaagcagtttactg |
| | ctgcacccagtggtcaaactgaaggtggaactattacctatgcttggagcgtagataatgttccacaagatggagctgaagcaacttttagttatacctgccggtcaaaagactattaaagtag |
| | ttgcaacaaatacaattccagaagctgaagctgaaacagcagaagctactacaactatcacagttcaaaataagacacaaacgaccaccttagctgtaactcctaatagccctgacgctgga |
| | gtaatcggaaccccagttcaatttactgctgccttagcttctcaacctgatggagcatctgctacgtatcagtggtatgtagatgattcacaagttggtggagaaactaactctacatttagctata |
| | ctccaactacaagtggagttaaaaaatcaagtgtgtagctcaagtaaccgcgacagattatgatgcactaagcgttacttctaatgaagtgtcattaacggttaataagaagacaatgaatcca |
| | caggttacattgactcctccttctattaacgttcaacaagatgcttcggctacatttactgctaatgttactgatgctccagaagaagcgcaaattacttattcatggaagaaagattcttctcctgta |
| | gaagggtcaactaatgtatataccgttgatacttcatctgttggaagtcaaactattgaagtgactgccgtcgttactgctactgattatgatagcaaaacagttaaaacaacaggtcaagttcag |
| | gtaactgataaagttgctccagaaccagaaggtgaattaccttatgttcatcctcttccacatcgtacttcagcttacatctggtgcggttggtgggttatggatgaaatccaaaaaatgactgaa |
| | gaaggtaaagattggaaaactgaagatccagagtaaatactacctgcatcgttacactcttcagaagatgatgaaagactatccagaagttgatgtccaagaatcgcgtaatggatacatcat |
| | tcataaaactgctttagaaactggtatcatctatacctatccataa (SEQ ID NO: 451) |
| 41 | atgagattagaagatcttcaagaagaattgaagaaagatgtgtttatagattcaactaaattacagtatgaagcagctaataatgtgatgttatacagtaaatggcttaataagcattcaagtatta |
| | aaaaggaaatgcttagaattgacgcacagaaaaaagttgctcttaaagctaaattagactactactcgggacgaggagatggtgatgaatttagtatggatcgttacgagaaatcagaaatga |
| | agacagttctatcagcggataaggatgttttaaaggttgatacctcgttacagtattgggggattttattagatttctgtagcggagctcttgatgctatcaaatcacgcggatttgctattaagcat |
| | attcaagacatgcgggcatttgaggctggaaaataatgagatatagcattgatgatgcttttaattatgaagaagaatttgaaactgagattcaattcttaatgaaaaagcataatcttaagcgtc |
| | aggatattcgtatcctggccgatcacccgtgtggtgaagatgtcctttatattaaaggaaaatttgccggatatcttgatgaatatttttattctaaagatatgggcattgatatgcatatgagagttg |
| | tataaatagatataattcagaggagacaatcatgtcagataagatttgtgttgtctgtaaaactccaatcgattctgcattggttgttgaaacagacaaaggtcctgtacatcctgggccttgctat |
| | aattacattaaagaactaccagtttcagaaagttcggaagaacaattaaatgaaacacaacttttgctatag (SEQ ID NO: 452) |
| 42 | atgtatgaatacaaatttgatgtgagagttggttctaaaataatcaattgtcgcgcattcacgcttaaagaatatctagaacttattactgccaaaaataatggttccgtagaagtaattgttaaaaa |
| | gctaatcaaagactgcacaaatgcaaaagatttaaaccgccaagaatcagaactattgctgattcatttatgggcgcattctcttggagaagttaatcacgaaaactcctggaagtgcacctgt |
| | ggaactgaaataccaacccatataaatctattacatacacaaatagatgcaccagaagacctctggtatacactgggtgacattaaaattaaattccgataccctaaaatttttgatgataaaaat |
| | atagcccacatgatagtatcatgcatagaaacgattcatgctaacggtgaaagcattccagttgaagacttaaatgaaaaagaactagaagatttatattctatcatcacagagtcagatattgt |
| | agctataaaagatatgcttttaaagcctaccgtttatttggctgttccaattaaatgtccagagtgtggaaaaacccatgctcatgtaataagaggcctcaaagagttctttgagttactataatgg |
| | caaatattaataagctttattctgacattgacccggaaatgaaaatggattggaacaaagatgtttccagatcacttggattaaggtcaattaaaaacagtcttttgggaattattacaacaagaaa |
| | aggttcaagaccgtttgaccctgaatttggatgtgatttatcagatcagctttttgaaaatatgactcctcttactgctgacacggttgagcgcaatatcgaaagcgcagtaagaaactatgagc |
| | cacgtattgataaattatcagttaatgtgataccagtttatgatgattatactctgatagtagaaatacgcttttcggtcatcgataaccctgatgatattgagcagataaaactgcaactggcttcg |
| | agtaatagggtataa (SEQ ID NO: 453) |
| 43 | atggcaaacattattcgttgtaaattaccagatggtgttcatcgttttaaaccatttacggtagaagattatcgagattttttgttagttcgaaacgatatagaacatcggtcaccacaagaacaaaa |
| | agaaataattactgatttaattgatgattattttggagactatccgaagacttggcaaccatttatatttttgcaggtatttgtagggtcaataggtaaaactaaagtaccggtcacatttgtatgtcca |
| | aaatgtaaaaaagaaaagacagttccatttgaaatatatcaaaaagaattaaaggaacctgtttttgatgtagctaatgttaaaattaaattaaagtttccttctgagttttatgaaaataaagcaaa |
| | gatgattactgaaaatattcattctgttcaagtagatgaaatatggtatgattggaaggaaattagtgaatcaagccaaatagaacttgttgatgccatcgagatagaaacattagaaaaaattct |
| | cgatgcaatgaatcctattaatttaactctacatatgtcatgctgtaataagtacattaaaaaatacactgatatagtagacgtgtttaagctgttagttaacccagatgagatatttactttttatcaa |
| | attaatcacacactcgtaaaaagtaattatagcttaaattcaataatgaaaatgattcctgccgagcgcggattcgtattaaaactgattgagaaggataaacaataatgagtatgttgcaacgc |
| | cccggatatccaaatctcagcgttaaattatttgatagctacgacgcttggagtaataatagatttgttgaattagctgctactattaccacattaactatgcgggattctctttatggacgaaatga |
| | aggaatgctgcagttttatgattctaaaaacatccatacaaaaatggatggaaatgaaataattcagatttctgtagctaatgcaaatgatattaataatgttaaaacacgaatttatggatgtaag |
| | catttttccgtgtcagtagattcaaaaggtgataacatcattgctattgaattgggaactattcattctatagaaaatcttaaatttggtagacaatttttccctgatgcaggtgaatctataaaagaaa |
| | tgcttggtgtcatttatcaggatcgcacattattaactccagcaataaatgctataaatgcttatgttcctgatattccatggactagcacatttgaaaactatttgtcatatgtaagagaagttgctct |
| | agctgtaggaagcgacaaatttgtatttgtatggcaagacatcatgggagttaacatgatggactatgatatgatgataaatcaagaaccatatccaatgattgtcggtgagccatctttaatag |
| | gtcaattcatccaagaattaaaatatccattagcatatgatttcgtttggttgactaaatcgaatccttacaaacgtgatccaatgaaaaatgctactatctatgctcattcatttttagattcttcactg |
| | ccaatgattactacaggaaagggtgaaaactctattgtagtgtcaagatcaggtgcttattctgaaatgacttataggaatggatatgaagaagctattcgtcttcaaactatggcacaatatgac |
| | ggttatgctaaatgttctactgtcggtaattttaacttgactcctggtgttaaaattatttttaatgatagtaaaaaccaatttaaaacagaattttacgttgatgaagttatccatgaattatccaataat |
| | aattcagtaactcatctatatatgttcactaatgcaacgaaactggaaacaatagacccagttaaggttaaaaatgaatttaaatctgatactaccactgaagaaagtagttcttccaataagcaa |
| | taaagaagtttctattcctaaaatgggtcttaaacattataacattttaaaggatgttaaaggtcctgatgaaaatttaaaacttcttattgattctatttgtccgaatttatcaccggcagaagttgattt |
| | cgtttctattcatttattggaatttaatggaaagattaaatctcgtaaagaaatagatggctatacttatgacattaatgatgtttatgtatgccaaagattagaatttcaataccaaggaaatacatttt |
| | attttagacctcctggaaaatttgaacaatttttaacggtgagcgatatgttatctaaatgcttgcttaaggtcaacgatgaagttaaagaaattaattttcttgagatgccagcattcgttttaaaatg |
| | ggcaaatgatatttttacaactttagcaattcctggccctaatggtccaataaccggaattggcaatattattggattatttgaatgaaaaagccacaagaaatgcaaacgatgcgtagaaaagtt |
| | atttcagataataaaccaacacaggaagcggctaaatccgcttctaacactttatctggacttaatgatatatctacgaaattggatgatgctcaagctgcttctgaattaatagctcaaactgtcg |
| | aagaaaaatcgaatgaaatagttggagcaattggtaacgtagaaaacgcagtgagtgatactactgccggttctgagttaattgctgaaactgtcgaaattggcaacaatattaataaagaaat |
| | cggtgaatcactcggaagcaaattagataaattaacaagtttactagagcaaaaaattcagacagctggaattcaacagactggaactagtttagccacagttgaaagcgctattcctgttaaa |
| | gtcgttgaggatgatactgctgaatctgtgggtcctttattaccggctcccgaagcagttaataatgatcctgacgctgattttttccctacccctcagccagttgaacccaaacaagaatcgcc |
| | agaagaaaaacagaaaaaagaagcatttaacttaaaattatctcaagctttagataaattaacaaagactgttgattttggatttaagaaatccatttcaattagtgataaaatatcaagcatgttat |
| | ttaagtacaccatcagtgctgctattgaagctgctaaaatgactgcaatgatattggctgttgttgttggaatagacctgttgatggttcactttaaatattggtcagataaattttcaaaagcctgg |
| | gatttatttaatactgactttactaaattctctagcgaaaccggaacttggggtcctttattacagagcatctttgattctattgataaaattaaacaactttgggaagcgggagattggggtggatt |
| | gacagtagctattgttgaagggcttggaaaggttctttataatttaggagaacttattcagcttggaatggctaaattatctgcggcaattcttcgagtcattcctggcatgaaggatactgctgat |
| | gaagtagaaggaagagcactagaaaatttccaaaattctactggagcatctctcaataaagaagaccaagaaaaagtagcaaattatcaagataaacgaatgaatggagaccttggcccaa |
| | tagcagaaggactagacaaaatctctaactggaaaactcgtgcatctaactggattcgtggtgtagataataaagaagcactgactactgacgaagaacgtgcagcagaagaagaaaaatt |
| | aaagcagctttcacctgaagaaagaaaaaatgctttaatgaaggccaatgaagctcgtgccgcgatgattcgttttgaaaaatatgctgattcagctgatatgagtaaagactcaacggttaaa |
| | tcagttgaagctgcctatgaagaccttaaacagcggatggatgacccggatttaaataattcgccggcagttaaaaaagaacttgcttctagatttgctaaaattgatgctacttatcaagagct |
| | caagaaaaatcagcctaatgccaaacctgaaacttctgctaaatcaccagaagcgaaacaggtccaggttattgaaaagaacaaagcacaacaagctcctgttcaacaagcatctccttca |
| | atcaataatactaataatgttattaagaaaaatactgtcgttcataatatgacacctgttacgagcacaactgctcctggtgtatttggcgcgactggagttaattaaggaataatatggcaattgtt |
| | aaagaaataactgctgatttaattaaaaagtccggtgagacaatttcagccggacagagcactaaatcagaagtaggaattaaaacatacacagcccagtttccaactgggcgtgctagtgg |
| | taatgacactacaggggacttccaggtaacagatctatataagaatggattattatttactgcatacaatatgtcatctagggattctggaagtcttagatcgatgagatctaactactcttcttcat |
| | cttcgagtattttacgtacagccagaaacactattagtagtacagtatcaaaactatcaaatggattaatatcaaataataattcaggaacaataagtaaagctcctgtcgcaaacattcttttacc |
| | gagatctaaatctgatgttgatacatcatcacatagatttaatgatgttcaagaaagccttatcagtagaggcggaggtactgctactggagtgctaagtaatattgcttcaaccgcagtatttgg |
| | ggcgttggaaagtataacacaaggtataatggctgataataatgaacagatttatacgacagccagaagtatgtatggtggtgctgaaaatagaactaaagtgtttacatgggatttaactcca |
| | cgttcaacagaagatttaatggctattattaatatctatcaatattttaactatttttcttatggtgaaacgggtaaatctcaatatgctgctgaaataaaggggtatttagatgattggtatcgttctac |
| | gttaattgaacctttatctccggaagacgcagctaaaaataaaacactatttgagaaaatgacatcgagtttaactaacgttctagtagtttcaaacccgacggtttggatggtgaaaaactttgg |
| | tgcaacatctaagtttgatggaaaaacggaaatatttggtccatgccaaatacagagcatcagatttgataaaacacctaacggtaactttaacggattagctattgctccaaatctccctagtac |
| | atttactctcgagattactatgagagaaattatcacgttaaaccgtgcttctttatatgcggggactttttaatgtattctttagaggaatttaataatcaagcaataaacgcagatttccaacgtaata |
| | atatgtttagctgcgtttttgcaacaactccatcaactaaaagctcttcgttgataagttcaattagcaacttttcttataataacttgggcctaaattcagattggttaggattaactcaaggtgatatt |
| | aatcagggaattacaacgctaattacagctggcacacaaaaactaataagaaaatcgggggttagtaaatatcttattggtgccatgagtcaacgtacagttcaaagtttattaggctcatttac |
| | agttggtacatatttaattgacttctttaacatggcatataactcatctggattgatgatatactctgtaaaaatgccagagaatagattatcctatgaaactgattggaactacaactctcctaatatt |
| | cgtataactgggagagaattagaccctttggttatttcatttagaatggattcagaatcgtgtaattaccgtgcaatgcaagactgggttaatgctgttcaagacccagtaactggattacgtgct |
| | ctgccacaagatgtcgaggcagatatccaggttaatcttcattctcgtaatggattgcctcatactgcggtgatgttcaccggatgtattccagtgtcagtgagcgctcctgagttatcatatgat |
| | ggagataaccaaataactacatttgatgttacttttgcgtatagagtcatgcaggctggagcagttgataggcaagctgcgcttgaatggcttgaatctgctgctataaatggtattcaaagctct |
| | tctggaaataatggaggtgttactgaactatctagttcgctttcacgacttagtagattaggaggaactgcaggaagcatttcaaacattaatactatgacagggattgtcaattcgcagagtaa |
| | aatattaggagcaatataa (SEQ ID NO: 454) |
| 44 | atgaaatcttctttgcgctttttaggtcaagaacttgtagttgaaggcgttattcctgctgataatgcttttaacgaagcggtttacgatgaatttattaaaatttttggaacagataaaaagttcggaa |
| | tttttccttctgaaaatttttcaaagccagaacagactgaaagcattttccagggtgtagtaacaggtaaatttgagtcagaagctccggtaaaaattgaagtttatattgaagacagtttagttgct |
| | tcagtttctgctttcatttcattccgtaaataa (SEQ ID NO: 455) |
| 45 | atggaactcattacagaattatttgacgaagatactactcttccgattacaaacttaaatccaaagaagaaaataccacaaattttttcagttcatgttgatgatgcaattgaacaaccaggctttc |
| | gtttatgtacctatacatctggaggtgatactaatcgcgatttaaaaatgggcgataaaatgatgcatattgttccttttacattaactgctaaaggttcaattgctaaattaaaaggtcttggtccaa |
| | gcccaattaattatatcaattcagtttttactgttgcaatgcaaacaatgcgtcagtataaaattgatgcttgtatgcttcgtattcttaagtctaaaactgctggtcaagctcgacaaattcaagttatt |
| | gctgatagacttatccgtagtcgttcaggtggcagatacgtccttcttaaggaactctgggattatgataaaaagtatgcatatattcttatacatcgcaaaaatgtatcactagaagacattccag |
| | gagttccggaaattagtaccgagctctttactaaagttgaatcgaaggtcggtgatgtttatatcaataaagatactggagctcaagtaactaaaaacgaggcaattgcagcatctattgcaca |
| | agaaaatgataaacgtactgaccaagctgtaatcgttaaagttaaaatttcccgtagagcaattgcgcaaagtcaatcattggaatcttctagatttgaaagtgaattattccagaagtatgaatc |
| | taccgcagctaatttcaataagcctgctaccgctcctttaattcccgaagcagaagaaatgaaaattggaattaattcattagcttctaaaacaaaggcagcaaaaattattgccgaaggaact |
| | gcgaatgaacttcactatgactataaattcttttcaaaaagtgaggttgatgaagtttctgaaaaaattaaagatgtaatttttaacgcgattaaaaatgaaccaactacttcaataaaatgtttaga |
| | gaaatacgcggcagctgtcaatcaattctttgaagaatataaagataattggcttgataaacataataaaactcgtaaagggcagccagatgaagtctggggagaaataactaaaaatgcctg |
| | gaatgcagcaaaaactaaattcctcaaacgaatgatttatagtttttctggaattggtgctggtccaatgattgatattactattgcttgtgatggttctaaatatacaccatcacaaaagcgcggta |
| | ttagagagtattgtggttcaggatatacagacattaataatcttcttttaggtcgttacaatccagaacgatatgatgtaatgagtgaaaaagaaattgaatctgctataaataatttagattcagctt |
| | ttgaaaatggtgaccgcataccggaaggcattacagtttatcgtgctcaaagtatgactgctcctatatacgaagcgctagttaaaaataaagtgttctatttcagaaattttgtatctacttctttaa |
| | ctcctatcatttttggacgttttggaattacacatgctggtattggtcttttagaaccagaagctcgcaatgaattaacagttgataaaaatgaagaaggaataactattaatccaaacgaaataag |
| | agcgtataaagaaaatcctgaatacgttaaagttcaaataggatgggcaattgatggagctcataaagttaatgttgtatatccaggaagtctcggaatagcaacagaagctgaagttattcta |
| | ccgcgcggattgatggtcaaagttaataaaataactgatgcttctaataatgacggaaccacgtctaataatacaaaactcattcaagctgaagttatgaccacagaagaactcaccgaatcg |
| | gtaatctatgacggagaccgtttaatggaaaccggcgaagtagttgcaatgacaggtgatattgaaatagaagacagagttgactttgcatcatttgtttcatcaaatgttaaacagaaagtag |
| | aatcatctctcggaattattgcgtcttgcatagatattacaaacatgccttacaagttcgttcaaggataaatcatggaacttattacagaattatttgacggcgcttcggcgccggttgttaactta |
| | aatcctaagcataaaataccacaaatttttgctattcaagccggcgaagaaagcgtgcttcctggatttagattttgtacatacacctctggtggtgatacaaataaaaacgttaagccaggcga |
| | taaaatgatgcatatcgtaatgataggtgtcaacgagaaattatcgctggttaagcttagaaacttgggtggaaatccaattggcgtcattaatgctgtttttgatactgctcttcaaacaatgaaa |
| | cagtataaaatcgacgcatgcttattccgcgtactaaaaagtaaaacaaatggcgcagctcgtcaaatgcaagttattgctgaccgtttagtacgtactaaaggagcaggtcgatatgttctttt |
| | aaaggaaatctgggactatgataaaaagtatgcatatattatggtttaccgtaaaaatgccaatttagaagacattccaggtgtacctcctatttcaactgagttattcgcaaaagttgaatcgaa |
| | ggtcggtgatgtttatgtagatgttaaaacaggtgatgctgttcctaaagctgtcgctgttgctgcttctattgctttagaaaatgataaacgtactgaccaagcggttattcagaaaactaaaatta |
| | gtcgtcgattagcagcacaagctcaatattctactgtcgatgcttcacttcagggtgatagcttcgctgccaagaaatatcaagagtttgaatctaaagttccggtatataaagcagaaggacc |
| | aatgaactctggcgttattcagattggttcaaacttcagcaaaggagctatcggtggtatgagaagtgcttctcgttttaaatctagcgattatgaactagaaaacttccgaaatcatattgcatta |
| | gcccatgcacgtttacgtgatccatctatcaagttacagagcgatataacatatcaaggttctcaagaatatttaaagaataaagaattctttgattataaaactgataaaattttaagtgatcttgct |
| | gatattaatatttctaatagctttgatgttattaagaaaattatcaatgatttggttaaaggttctaaagctacgccagatgaaaagacagttattattcaatttgtcatgaatggcatttataaattgatt |
| | aatgaatctgctgcccaggcatatgaatatgcaagcactgaagtaactccaaaaggactgactcaggctgagtctgatgtaattgaagattattgtgcagattcatatgttgaaatgaactcgtt |
| | ccttttgggtaaaccagattctacccgtgaagaatatatggaacgtgctattaagcacatcgagacgttggattctgcattcgctaaaggttcagttcttcctccaggaactacgctttatcgcgg |
| | acaagaagttacctttaaaactttgcgtcacaacattgaaaacaaaatgttctatttcaagaacttcgtatcgacatcacttaaaccaaatatctttggcgagcatggtaaaaactatatggctcta |
| | gatgattccggtgcagtattttctggagaaggagaaggttccgttgatgcagaagatttgatgcatatgggtagtcattctacatatgctaatgaagatgctgaaactagcgtgggtatggtaat |
| | taaaggagctgagcgaatcaaagttatcgttccaggtcatttatcaggatttccatcagaagctgaagttattctaccgcgtggaattttactgaagattaataaagtaagtacgtactttatgaaa |
| | gaaactgcttataacaagtatctaatcgaaggtacaatcgttcctccttctgaacaattagaagaatcagtatatgatggagaccatttaatggaaactggtgaagttcgtccaatggctggattt |
| | aatcaattccttgtagaagaatcaaaagaagaggaaaacgaagtttctcaaatattagcttctttggttaacatcaacggaatgtctaaaaagttcaaaatgtag (SEQ ID NO: 456) |
| 46 | atgaactacatcaactttgaacgtaaatatgtttctaatggtattgcaggttctattgatactatctgcctttggaaacatcaaaatggatcagtatgcgaaattgaacagtatatgactcctaactat |
| | gtttatatgcgatttgaaaatggcatcacggtttcaatcacaatggaaggttccaactttaaaatcgctctggatgatgattttcgtcaacgcgatttagggactcatccttgctggaatggtgcta |
| | atcgcaagcttttggttaaaacttggattcgtcatattctgagtaacagagctaaacctgagcatcttgaagcaatctttgatgtagttcttaacgaatttgatatttaa (SEQ ID NO: 457) |
| 47 | atggcaaaacaagctaaagcaaagaaagcagttgaaaagaaagttggtgattctaaacgcgctggctacaagcgtgggtcgaactctcgtatcaatcaaactgttgagaagatcatgcgcc |
| | gagcacgtgcggttcttcgagatgatgcttctcgttttggtaagcagaaagcataa (SEQ ID NO: 458) |
| 48 | atgattaaacaattacaacacgctcttgaactgcaacgaaacgcatggaataatggtcacgaaaactatggcgcatctattgatgttgaagccgaagctcttgaaatcctgcgttatttcaaaca |
| | tctgaatcctgctcaaactgcattagctgccgagcttcaggaaaaagatgaacttaaatatgctaagcctctggcttctgccgcgcgaaaagcagttcgtcactttgtggtaacattgaagtaa |
| | (SEQ ID NO: 459) |
| 49 | atgtctgaagtacaacagctaccaattcgtgctgtcggtgaatatgttattttagtttctgaacctgcacaagccggcgatgaagaagttacagaatcaggacttattatcggtaaacgtgttcaa |
| | ggtgaagttcctgaactgtgtgtaattcactctgtcggtcctgatgttcctgaaggtttttgtgaagttggtgatttgacttctcttccagttggtcaaattcgaaacgttccgcatccttttgtagctct |
| | gggtcttaagcagccaaaagaaattaaacaaaaattcgttacctgtcattataaagctattccgtgtctttataagtga (SEQ ID NO: 460) |
| 50 | atgctgctaagtgaaaaaccgattactgttaaagaattccaagaaaaagttaagctatttgcgcaggaattggtaaataaggtttctgaacgatttcctgaaacatcggttcgtgttattaccgaa |
| | actcctcgttcagtattagtaattgtgaatccaggtgatggcgatcaaatatcgcatcttaaactggattttgatggattagttgaagcacaaagggtgtatggcgtactatgatgaatttaactga |
| | tataattgataattgtcttgaaaatgatactggcgatcatagagcgcttgactctgaaacagcaaagttcattagaataactttaatgaatgatactctggtgaatagtattcatccttctgtgtatga |
| | tgctattattgtgacgaagtatccagttgagcttcataaaaagatgactggcgcagtttttattgataagaaaaaccgctttaaagatgggcagaatataattagttctgttattaaaagtataacta |
| | aacttcgtcacgaaatttatcgtgttgaaactgctaaatctgcttatctggtgattatgaaatgaaagcgagtacagtacttcaaattgcatatttagtatcgcaggaatcaaaatgttgctcctgga |
| | aggtaggagcagtaattgaaaagaatggacgtattatttctactgggtataatggttcacccgcagggggtgtgaactgttgtgattatgctgctgagcaaggttggttgctgaataagcctaa |
| | acatactatcattcaaggccataagcctgaatgcgtatcatttggttcaactgatcgttttgtcttggcgaaagaacatcgtagtgctcactctgaatggtcgtctaaaaatgaaattcatgctgag |
| | ctaaatgcaattttgtttgctgcacgaaatggttcttctattgaaggtgctactatgtatgtaacactttctccttgtccagattgtgcaaaagcgatagctcaatctggtattaaaaagctggtttatt |
| | gcgaaacatatgataaaaataaacctggctgggatgatattctgcgaaatgcaggtattgaagtgtttaatgttcctaagaaaaacttgaataagttaaactgggaaaatatcaacgaattctgc |
| | ggtgaataatgaaatttcgtttggtaaagctcacagcaattagttcttattctaatgagaacatctcgtttgctgtagagtataagaaatattttttctctaaatggaaacagtattataagacaaattg |
| | ggtttgtattgataaaccatatagttggaaatctgatttagaaaaattccaaaaattactttccacccttaaagaacgtggaacaactcatattaaaactgtaataggtaaataaatgaaactgaca |
| | actgagcagaaagtagcaattcgtgaaattttgaaaactaaattgtccatgggtgtttcaaacgtagtttttgaaaagtctgatggtactattcgtactatgaaaggtactcgtgatgcagactttat |
| | gccaaccatgcaaaccggtaaattgactgaatctactcggaaagaatctacggatatgattccagtatttgatgttgaacttggcgcttggcgaggtttttctattgacaaattgatttctgttaatg |
| | gtatgaaagttgagcatttgcttcaatttattggtaaataa (SEQ ID NO: 461) |
| 51 | atgtttcctacttattctaaaatcgtagaagtagtgtttagccaaattatcgctaataatatgtttgaaaaacttgataacgcagccgagcttcgaatccatgctcaagtgactcatgtattgaacact |
| | ttgcttccagaccaggtggattctgttgccattacgctgtatccaggttccgcgcatatcattgttgtattcggtcttgatgctgagctagtcatcaaaggcgatattcgttttgaatcgcagacag |
| | cagaattcaaagcaatttaa (SEQ ID NO: 462) |
| 52 | atgaaacaataccaagatttaattaaagacatttttgaaaatggctatgaaaccgatgatcgaacaggcacaggaacaattgctttgttcggtactaaattacgctgggatttaagtaaaggtttt |
| | cctgcagtaacaactaaaaagctcgcctggaaagcttgcattgctgagctactttggtttttatcaggaagcacaaatgtcaatgatttacgattaattcagcatgattcattaattcaaggcaaa |
| | acagtctgggatgaaaattacgaaaatcaagcaaaagatttaggataccatagcggtgaacttggtccaatttatggaaaacagtggcgtgattttggcggtgtagaccaaattgtagaagtt |
| | attgatcgtattaaaaaactgccgaatgataggcgacaaattgtttctgcgtggaatccagctgaacttaaatatatggcattaccgccttgtcatatgttctatcagtttaatgtgcgtaatggcta |
| | tttggatttgcagtggtatcaacgatcagtagatgtttttcttggtcttccatttaatattgcatcatatgctgcgttagttcatattgtagctaagatgtgtaatcttattcctggagatttgatattttctg |
| | gcggtaatactcatatctatatgaatcacgtagaacaatgtaaagaaattttgcgtcgtgaacctaaagagctttgtgagctggtaataagtggtctaccttataaattccgatatctttctactaaa |
| | gaacaattaaaatatgttcttaaacttaggcctaaagatttcgttcttaacaactatgtatctcacccgccaattaaaggaaagatggcggtataattttaatttaattgcgaggatatatgattttac |
| | gatttaaagatacttctggtgtcgttctttttacacttcctaatccaagcgagttagaagttccaggaccaaatcagcctattatcatttatggcaaaaaatattatactcataaaatgactcgtgagt |
| | attttgataataaaatttctacagttaaaacttcttcagattgttactatgatattactgttttaacggaaaaacaatatgacgaattatcgccgcgcgggccgtctatgccaggtagtgaataaatat |
| | aaatccgactttgatgttaatattcaccgtggtacattttggggaaattacgtcggtaaagatgctggcagccgggaggctgccattgaattattcaaaaaagattttatacgtcgaattaaatcc |
| | ggagaaataactaaagaacatttagagcctttacgtggaatgaggctaggatgcacatgtaaaccaaagccgtgtcatggtgatataatagctcatatagttaaccgattgtttaaagacgattt |
| | tcaagttgaggacttatgcaattaattaatgttatcaaaagtagtggtgtttctcagagctttgacccgcaaaaaattattaaagttttatcttgggcagctgaaggaacatctgtagatccttatga |
| | attatatgaaaatattaaatcatatctccgtgatggaatgaccactgatgacattcagactattgtcattaaggctgctgcgaattctatttcggttgaagaacctgattatcaatatgtagctgcac |
| | gctgtttaatgtttgctcttcgtaaacatgtttatgggcagtatgaaccgcgttcatttattgaccatatttcttactgtgtaaatgaaggtaaatacgaccctgaattgttgtcaaaatattctgcaga |
| | agaaattacatttttagaatcaaaaattaagcacgagcgggatatggaatttacttattccggggcgatgcaattaaaagaaaaatatctcgttaaagataaaaccactggtcaaatttatgaaa |
| | ctccacagtttgcatttatgactattggaatggcattgcatcaagatgaacctgttgacagattaaaacatgttattcgtttttatgaagcagtatctactcgacagatttcactgccaactcctattat |
| | ggctggttgccgtactccaactcggcagtttagttcatgcgttgttattgaagctggtgattcattaaagtcaattaataaagcttctgcttcaattgttgaatatatttctaaacgcgctggaattgg |
| | aattaacgttggtatgattcgtgccgaaggttctaagattggcatgggtgaagtacgccatactggtgttattcctttttggaaacattttcagactgctgttaaatcatgttcacagggtggaattc |
| | gtggcggcgctgctactgcttattatcctatttggcatttggaagttgaaaatcttctcgttttgaaaaataacaaaggcgtagaagaaaaccgcatccgtcatatggattatggtgttcaactga |
| | atgatttgatgatggaacgattcggaaagaacgattacattactttgttcagtccgcatgaaatgggtggagagctgtattattcttattttaaagaccaagaccgtttccgtgaattatacgaagc |
| | agcagaaaaagaccctaatattcgtaaaaagcgtattaaagcccgtgaactatttgaattgctcatgactgaacgttcaggaacagcaaggatttatgtgcagttcattgataatacgaataact |
| | atactccgtttattcgtgaaaaggcacctattcgtcagagtaacttgtgctgtgaaattgctattccaacaaatgatgtgaatagtcctgatgctgaaattggattgtgtactctctctgcattcgtac |
| | tagataattttgactggcaagaccaagataaaattaatgaattggcagaagttcaagttcgtgctcttgataatctgttggattaccaaggatatccagttcctgaagcagaaaaagctaaaaag |
| | cgtcgtaaccttggtgtaggtgttactaactatgcagcttggctggcaagtaactttgcttcttatgaagatgctaacgatttaacacatgaactatttgagagattacagtatggactcattaaag |
| | catccattaagctcgccaaagaaaaaggaccttgtgaatattattcagacactcgttggtctcgaggcgaattacctatcgactggtacaataaaaagattgaccaaatcgcagctccaaaata |
| | cgtttgtgactggtcgtcgctgcgggaagaccttaagctctttggcatccgtaatagcacattatcagcacttatgccatgtgagtcatcttcccaagtttctaacagtacaaacggtatcgagc |
| | ctccacgtggaccagtctctgttaaagaatcaaaagagggttcctttaatcaagtcgtgcccaatattgaacataacatagacctatatgattatacatggaaattagctaagaaaggtaataaa |
| | ccttatcttacgcaggtagctattatgctgaaatgggtatgtcaatcagcttcagcgaatacatattatgacccgcagatttttccaaaaggaaaggttccaatgtcaataatgattgatgacatgt |
| | tatacggatggtattatggcattaaaaatttctattatcataatacccgcgatggttctggtactgatgattatgaaatagaaactccaaaagctgaagattgttcatcctgtaaattatga (SEQ |
| | ID NO: 463) |
| 53 | atgagattacaacgccaaagcatcaaagattcagaagttagaggtaaatggtattttaatatcatcggtaaagattctgaacttgttgaaaaagctgaacatcttttacgtgatatgggatggga |
| | agatgaatgcgatggatgtcctctttatgaagacggagaaagcgcaggattctggatttaccattctgacgtcgagcagtttaaaactgattggaaaattgtgaaaaagtctgtttgaaggaga |
| | tgatatgatttttgtatttgaatttatgaatgatgaattcgattatgcaatttttaacgcattgcataatcctgatttaaatgaatttaatgaaatgttttctgacgctttgagtatgtcagaagaatactgc |
| | ggagaatgtcaacgtgtttgtgtgacagtctttgaaaacaaagaaaagacgtatgaagaattattctttgacgctaataaagccactgaatggtttattgaaaggggttttgcgtaatgattaaatt |
| | ggtattcgcttattctccaactaaaacggtcgaaggctttaatgaattagcattcggtttatgtgatggtttaccatggggacgagttaaaaaggacctccagaattttaaagctcgtactgaagg |
| | tacaattatgattatgggtgctaaaacgttccagtcattgtctacattacttcctggtcgtagccatattgtagtatgtgacctcgagcgtgattatcctgaaactaaagacggtgatttagcacattt |
| | ctatattacatgggagcagtacataacttacatttctggcggttcaattcaagtgtcaagtcctaatgcaccattcgaggctatgcttgatcagaattctaatgtaagcgtaattggcggacccgc |
| | tttgttatatgctgcattaccttgtgcggatgaagtagttgtttctcgcatcgttaaaaggcatcgtgttaattcaacggttcaattagatgcaagttttcttgatgatataagcaagcgtgaaatggtt |
| | gaaacccattggtataaaatagatgaagtaacaacccttacggaatcagtgtataaatgaaataacgcgtggcggaaaatatgaactttaattattaccctattctattagaaaaagacgcgaa |
| | acaaccaaaatggcagggtcctcagtttattaaaggcgtctatcaattagtagttcctaaagacaagatttatagcagttgtttcactgaatccgcttgcagtattttcggtaatagttctccgtatt |
| | ggaattttgatataaaactggatagaaatatcgatatttggttgaaagccatggatattggcaatattacgtttgatgagaataattatcatattattggtcgcttttctaaacgcggtaaagaattat |
| | atttcactcctgaaatcgaaagaaaatttgatgctaaaccgtattga (SEQ ID NO: 464) |
| 54 | atgtatattggcaaaaagtatgaacttgttccaagacttattgatacatttattaattatcgcccacgttctaattcatcaatagttaaaattattgaagaaaatggcgggtggtttgaagttaaagaa |
| | actttctttgttgatggatttagagcaataaaacacattgaatgcgcaaatggaaagcatttttactttaacatttgtgaagatgaatttcattgttttcgtgagtataaagaacagacttctgaagaa |
| | gatgaaatcgaagacaaggtttctggcgtaacaaaaattcactgcattgtagacgaaaacaatgtagatgaaatcattgaacttttgcgaaaaactttcaaaaagtag (SEQ ID NO: |
| | 465) |
| 55 | atggctaaagttgatattgacatcgttgattttgaatatattgaagaaattattcgtaatcgttatcctgaacttagtatcacaagcgtgcaagattctaagttttggagtattcaaatcgttattgaag |
| | gtcctcttgaagacctcacccgctttatggctaatgaatattgcgatggtatggattctgaagacgcagaattttacatgggactgattgaacaataa (SEQ ID NO: 466) |
| 56 | atgtttaaacgtaaatctactgctgaactcgctgcacaaatggctaaactggctggaaataaaggtggtttttcttctgaagataaaggcgagtggaaactgaaactcgataatgcgggtaacg |
| | gtcaagcagtaattcgttttcttccgtctaaaaatgatgaacaagcaccatttgcaattcttgtaaatcacggtttcaagaaaaacggtaaatggtatatcgaaaattgctcatctacccacggtga |
| | ttacgattcttgtccagtatgtcagtacatcagtaaaaatgatttgtacaacactgacaataaagagtacggtcttgttaaacgtaaaacttcttactgggctaacattcttgtagtaaaagatccag |
| | ctgctccagaaaacgaaggtaaagtatttaaataccgtttcggtaagaaaatctgggataaaatcaatgcaatgattgcagttgatgttgaaatgggtgaaactccggttgatgtaacttgtccg |
| | tgggaaggtgctaactttgtactgaaagttaaacaagtttccggatttagtaactacgacgaatctaaattcctgaatcaatctgcgattccaaacattgacgatgaatctttccagaaagaactg |
| | ttcgaacaaatggttgacctttctgaaatgacttctaaagataaattcaaatcgttcgaagaactgagcactaagtttagtcaagttatgggaactgctgctatgggtggtgccgcagcgactgc |
| | tgctaagaaagctgataaagttgctgatgatttggatgcattcaatgttgatgacttcaatacaaaaactgaagatgattttatgagctcaagctctggcagttcatctagtgctgatgacacgga |
| | cctggatgaccttttgaatgacctttaa (SEQ ID NO: 467) |
| 57 | atggatttagaaatgatgctggatgaagattacaaagagggaatttgctttattgactttagtcaaattgcgctttcaactgctttagtaaacttcccagataaagaaaaaattaatttatcaatggtt |
| | cgtcatttgatattgaactcaattaagtttaatgtcaaaaaagcaaaaacgcttggatacactaaaatcgtgttgtgtattgataacgcgaaatctggatattggcgtcgtgattttgcttattattata |
| | agaaaaaccgtggaaaagcacgagaagaatctacttgggactgggaaggttattttgaatccagccataaagttatagatgaattgaaagcttatatgccatacattgttatggatattgataag |
| | tatgaagcggatgaccatattgctgttcttgttaaaaagttctctttagaaggacataagattttaatcatttcgtcggatggtgactttacacagcttcacaaatatccaaatgttaagcaatggtct |
| | ccaatgcataagaaatgggttaaaattaaaagcggttctgctgaaattgactgtatgactaaaatccttaaaggcgacaaaaaggataacgttgcttcagttaaagtacgatctgacttctggttt |
| | accagagttgaaggtgaacgaactccttcaatgaaaacttcaatcgttgaagccattgctaatgaccgtgagcaagctaaggtgcttctcacagaatctgaatataatcgttataaagaaaattt |
| | agttctaattgattttgattatattcctgataatattgcttcaaacattgtgaattactataattcatataaattaccaccgcgtggcaaaatttattcatattttgtaaaagcgggtctttctaaattaacta |
| | atagcattaatgaattttgaggtgaataatggctaaaaaagaaatggttgaatttgatgaagctatccatggcgaagacttggctaaatttattaaagaagcatctgatcataaactgaaaatttcc |
| | ggttataatgaactgattaaagatattcgaattcgtgctaaagatgaacttggcgttgatggtaagatgtttaatcgtctattagctttgtatcataaagataaccgtgatgtgtttgaagctgaaact |
| | gaagaggtagttgaactttatgacacagttttctctaaatgatattcgtccggtcgatgagaccggtctttcagaaaaagaactttcaatcaagaaagaaaaggatgaaatagcaaagcttcttg |
| | atcgtcaagaaaatggatttattattgaaaaaatggtagaagagtttggaatgagttatcttgaagctacaacagcattcttagaagaaaattctattcctgaaactcaatttgctaaatttattcctt |
| | cgggtataattgaaaaaattcagtcagaagctattgacgaaaatcttttacgtccttctgttgttcgctgtgaaaaaactaatacattagattttctactatgattaaattccgcatgcctgctggtgg |
| | tgaaagatacattgatggtaaatcagtttataaattatacttaatgataaaacagcatatgaatggaaagtatgatgttattaagtataattggtgcatgcgggtgtctgatgccgcttatcaaaag |
| | cgaagggataagtattttttccagaagttatcagaaaaatataaattaaaggaacttgctttaatttttataagtaatttggttgctaaccaagatgcttggattggtgacatctctgacgctgatgca |
| | cttgtgttttatcgtgaatatatcggacgcttaaagcaaattaaatttaagtttgaagaagatattcgcaacatttattattttagtaaaaaagttgaagtttctgcttttaaagaaatctttgaatataat |
| | ccaaaggttcaatcaagttatatttttaaactgcttcagtcgaatataatttcgtttgaaacgtttatcttgcttgattcgtttttaaatataattgataaacacgatgaacagactgataatttagtctgg |
| | aataattattctataaagttaaaggcttatagaaaaattttaaatattgattcacagaaagctaaaaatgttttcattgaaactgtgaaatcttgcaagtattaa (SEQ ID NO: 468) |
| 58 | atggccgagattaaaagaaagttcagagcagaagatggtctggacgcaggtggtgataaaataatcaacgtagctttagctgatcgtgccgtaggaactgacggtgttaacgttgattactta |
| | attcaagaaaatacagttcaacaatatgatccaactcgtggatatttaaaagattttgtaatcatttatgataaccgcttttgggctgctataaatgatattccaaaaccagcaggagcttttaatag |
| | cggacgctggagagcattacgtaccgatgcaaactggattacggtttcatccggttcatatcaattaaaatccggtgaagcaatttcggttaatactgcagctggaaatgacatcacgtttactt |
| | taccatcttctccaattgatggtgatactatcgttctccaagatattggaggaaaacccggagttaaccaagttttaattgtagctccagtgcaaagtattgtaaactttagaggtgaacaagtac |
| | gttcagtactaatgactcatccaaagtcacagctagttttaatttttagtaatcgtctgtggcaaatgtatgttgctgattatagtagagaagctgtaattgtaacaccagcgaatacttatcaagca |
| | caatcaaacgattttatcgtgcatagatttacttctgccgcaccgataaatattaaacttccgagatttgctaatcacggagatattattaatttcgttgatttagataaactaaatccactttatcatac |
| | aattgttactacatacgatgaaactacttcaatacaagaagatggaactcattctattgaagaccgtacatcaatcgacggtttcttgatgtttgatgataatgagaaattgtggagattgtttgacg |
| | gggacagtaaagcacgtttacgtatcataacgactaattcaaacattcttccaaatgaagaagttatggtatttggtgcgaataacggaacaactcaaacaattgagcttcagcttccaactaat |
| | atttctgttggtgatactgttaaaatttccatgaattacatgagaaaaggacaaacagttaaaatcaaagctgctgatgaagataaaattgcttcttcagttcaattactgcaattcccaaaacgctc |
| | agaatatccgcctgaagctgaatgggtaactgtccaagaattagtttttaacggtgaaactaattatgttccagttttggagcttgcttatattgaagattctgatggaaaatactgggttgtacag |
| | caaaacgttccaaccgtagaaagagtagattctttaaatgattctactagagcaagattaggcgtaattgattagctacacaagctcaagctaacgtcgatttagaaaattctccacaaaaaga |
| | attagcaattactccagaaacgttagctaatcgcactgctactgaaactcgcagaggtattgcaagaatagcaactactgctcaagtgaatcagaacaccacattctcttttgctgacgatattat |
| | catcactcctaaaaagctgaatgaaagaactgctactgaaactcgcagaggtgttgctgaaattgctacgcagcaagaaactaatacaggtactgatgatactacaatcatcactcctaaaaa |
| | gcttcaagcccgtcaaggttctgaatcattatctggtattgtaacttttgtatctactgcaggtgctactccagcttctagccgtgaattaaatggtacgaatgtttataataaaaacactaataattta |
| | gttgtttcacctaaagctttggatcagtataaagctactccaacgcagcaaggtgcagtaattttagcagttgaaagtgaagtaattgctggaaaaagtcaggaaggatgggcgaatgctgttg |
| | taacgccagaaacgttacataaaaagacatcaactgatggaagaattggtttaattgaaattgctacgcaaagtgaagttaatacaggaactgattatactcgtgcagtcactcctaaaacttta |
| | aatgaccgtagagcaactgaaagtttaagtggtatagctgaaattgctacacaagttgaattcgacgcaggcgtcgacgatactcgtatctctacaccattaaaaattaaaaccagatttaata |
| | gtactgatcgtacttctgttgttgctctatctggattaattgaatcaggaactctctgggaccattatacccttaatattcttgaagcaaatgagacacaacgtggtacacttcgtgtagctacacaa |
| | gttgaagctgctgcaggaaaattagataatgttttaataactcctaaaaagcttttaggtactaaatctaccgaatcgcaagagggtgttattaaagttgcaactcagtctgaagctgtggctgga |
| | acgtcagcaaatactgctatatctccaaaaaatttaaaatggattgtgcagagtgaaccttcttggagagcaactactacggtaagagggtttgttaaaacttcgtctggttcaattacattcgttg |
| | gtaatgatacagtcggttctacccaagatttagaactttatgagaaaaataattatgcagtatcaccatatgaattaaaccgtgtattagcaaattatttgccgttaaaagcaaaagctgtagatag |
| | taatttattggatggtctagattcatcccagttcattcgtagggatattgcacagacggttaatggttcactaaccttaacccaacaaacgaatctgagtgcccctcttgtatcatctagtactgcta |
| | cgtttggtggttcagtttcggcaaatagtacattaactatttctaatactggtacgacttcttctcgatttacatttgagaaaggtcctgcttctggtagtaatgctgattctgcattgtatgttcgtgtat |
| | ggggtaataagtacagcggcggttctgatgtaactcgtgcaacgattatagaattctctgatgctaccggctctcatttctattctcaaagagatacgtcaaataatgtgttgttcaacatttcagg |
| | tacgatgcaatcagtcaacgctagcgttcgtggtgttctgaacgttacaggtgtctcaacgtttaatagttcagttacagccaatggtgaattcatcagtaaatcaccaaatgcttttagagcaat |
| | aaatggaaattacggattctttattcgtaatgctggtaatgacacctattttatgctcactgcagcaggtgatcagagcggtggatttaatggattacgtccattatcaattaataatcaatccggtc |
| | aggttacgattggtgaaagcttaatcattgccaaaggtgctactataaattcaggtggtttgactgttaactcgagaattcgttctcagggtactaaaacatctgatttatatacccgtgcgccaac |
| | atctgatactgtaggattctggtcaatcgatattaatgattcagccacttataaccagttcccgggttattttaaaatggttgaaaaaactaatgaagtgactgggcttccatacttagaacgtggc |
| | gaagaagttaaatctcctggtacactgactcagtttggtaatacacttgattcgctttaccaagattggattacttatccaacgacgccagaagcgcgtaccactcgctggacacgtacatggc |
| | agaaaaccaaaaactcttggtcaagttttgttcaggtatttgatggtggaaaccctcctcaaccttctgatattggtgctttaccttctgataatgcaacaatcggaaacttgacaataagggattt |
| | cttaaggattggtaatgtccgcattattccagaccctgtgaataaatctgttaaattcgagtggattgaataagaggtattatggaaaaatttatggctaagtttggacaaggatacgtccaaacg |
| | ccatttttatcggaaagcaattcagtacgatttaaattaagcatagcgggatcttgcccgctttctacagcaggaccatacgttaaatttcaagataatcctgtaggaagtcaaacatttagcgca |
| | ggtcttcatttaagagtttttgacccttccaccggagcattagttgatagtaagtcatatgctttttcgacttcaaatgatactacatcagctgcttttgttagcttcatgaattctttgacaaataatag |
| | aattgttgctatattaactaacggaaaggttaattttcctcctgaagtagtatcttggttaagaactgcaggaacgtctgcttttccatctgattctatattgtcaagattcgacgtatcatatgctgctt |
| | tttatacttcttctaaaagagctattgcattagagcatgttaaactgagtaatagaaaaagcacagatgattatcaaactattttagatgtcgtatttgacagtttagaagatgttggagctaccggg |
| | tttccaagaagaacgtatgaaagcgttgagcaatttatgtcagcggttggtggaactaataacgaaatcgcgcgtttaccaacttcggctgctataagtaaattatctgattataatttaattcctg |
| | gtgatgttctttatcttaaaacacagctatacgccgatgccgatttacttgctcttggaactacgaatatatccattcgattttataatgcatcaaatggatatatttcctcgacacaagctgaatttac |
| | cgggcaagctggtgtttgggaattaaaagaagattatgtagttgttccagaaaatgcagtaggatttacgatatatgcacaaagaactgcacaagctggtcaaggtggaatgaggaacttaa |
| | gcttttctgaggtatcaagaaatggtagtatttcgaaacccgctgaatttggtgtcaatggtattcgagttaattatgtctgtgaatctgcttcacctccggatataatggtacttcctacacaagcat |
| | cgtctaaaactggtaaagtgtttgggcaagaatttagagaagtataa (SEQ ID NO: 469) |
| 59 | atgtttactacagctgaactaaaacgagcaaaagctaagaaagggcaaggaaaatataaagctgaattagttaaagaacttcagtttgctgaggctgaattgaattcaatgattattcaaaatg |
| | ctccagaaactgaaattgctcttaaacgtattgcgaataagtgtcttcgtgatgcaatcgtcgatcttttagcggattattgagtaaaatgaaaatcgttgagattgaactatgagttcattatggtg |
| | gtgttttgtttggttaattagtattccattaatttgtttaacatttacttttgtgatgaggttattatgaaaatttttaattctgtacttattgcttgtgcgtggtgggttgcacaagtttcggcagtagtgattg |
| | gtattcacatttattacgaatatttttaa (SEQ ID NO: 470) |
| 60 | atgtacaatattaaatgcctgaccaaaaacgaacaagctgaaattgttaaactgtattcaagtggtaattacacccaacaggaattggctgattggcaaggtgtatcggttgacacaatccgtc |
| | gtgttttgaaaaatgctgaagaagctaaacgccctaaagttactattagcggtgatattacagttaaagttaatagcgatgcagttattgctccagttgctaaatctgacattatttggaatgcatct |
| | aaaaaattcatttcaattactgttgacggtgtaacttataacgcaactcctaatactcattcaaactttcaggaaattcttaatctgcttgtagcggataagctggaagaagctgcgcaaaaaatta |
| | atgttcgtcgcgctgttgaaaaatatatttccggcgatgttcgaattgaaggtggaagcttgttctatcaaaatattgaattgcggtctggtttggttgatcgtattcttgactcgacggaaaaagg |
| | cgaaaactttgaattttattttccgttcttggaaaatctgctggaaaacccaagccaaaaagcggtatctcgactctttgatttcttggtagcaaacgatattgaaatcaccgaagatggttacttct |
| | atgcttggaaagtagttcgtgacaactactttgactgtcactcaaacacctttgataacagtccgggtaaagtagttaaaatgccacgtactcgtgtgaatgacgatgatacacaaacttgttctc |
| | gtggtctgcatgtgtgttctaaatcttatattcgtcactttggcagttcaaccagtcgagttgtaaaagttaaagtacatccgcgtgatgtagtatcaattccgattgattacaacgatgctaaaatg |
| | cgtacctgccaatacgaagtagttgaagacgttactgaacaatttaaataagggcttcggcccttatcatattaaggaaaattatgttaggttatcaagcacgagtaaaagaagaatacgatca |
| | attaatgctcaaaattaatgcactgagtaaatttttagaaagcacaaagtttctaacggttagtgcagttgagcaagaactgctactttcgcagtttatctcaatgaaatcttatgctgagtgtctag |
| | agaaaagaattgcgcaattcaaataa (SEQ ID NO: 471) |

[0431] Various modifications and variations of the described methods, pharmaceutical compositions, and kits of the invention will be apparent to those skilled in the art without departing from the scope and spirit of the invention. Although the invention has been described in connection with specific embodiments, it will be understood that it is capable of further modifications and that the invention as claimed should not be unduly limited to such specific embodiments. Indeed, various modifications of the described modes for carrying out the invention that are obvious to those skilled in the art are intended to be within the scope of the invention. This application is intended to cover any variations, uses, or adaptations of the invention following, in general, the principles of the invention and including such departures from the present disclosure come within known customary practice within the art to which the invention pertains and may be applied to the essential features herein before set forth.

1. An engineered system comprising an ATPase and an adenosine deaminase wherein the ATPase and the adenosine deaminase are derived from same or different prokaryotes.

2. The engineered system of claim 1, wherein the ATPase comprises a sequence of WP_012906049.1 or WP_155731552.1, and the adenosine deaminase comprises a sequence of WP_012906048.1 or WP_064360593.1.

3. The engineered system of claim 1, wherein the ATPase comprises 1100 or less amino acid residues.

4. The engineered system of claim 1, wherein the adenosine deaminase comprises 1100 or less amino acid residues.

5. The engineered system of claim 1, further comprising a membrane protein.

6. The engineered system of claim 5, wherein the membrane protein comprises a SLATT domain or Csx27.

7. The engineered system of claim 1, wherein the system is configured to modify a target nucleic acid.

8. The engineered system of claim 7, wherein the target nucleic acid is RNA.

9. The engineered system of claim 7, wherein modification of the target nucleic acid comprises causing an A to G mutation in the target nucleic acid.

10. The engineered system of claim 1, further comprising one or more phage proteins.

11. The engineered system of claim 10, wherein the one or more phage proteins are in Tables 18A-18B.

12. An engineered system comprising one or more reverse transcriptases comprising one or more UG1, UG2, UG3, UG8, UG15, or UG16 reverse transcriptase.

13. The engineered system of claim 12, comprising a first and a second reverse transcriptase.

14. The engineered system of claim 13, wherein the first and the second reverse transcriptases are comprised in a protein.

15. The engineered system of claim 12, further comprising:
a SLATT domain;
a DNA polymerase;
a family A DNA polymerase;
a serine protease domain linked to or associated with the one or more reverse transcriptases;
an MBL domain;
a nitrilase;
a nitrilase, wherein the nitrilase and the one or more reverse transcriptases are comprised in a protein, and the nitrilase is at a C-terminus of the protein; or
a protease.

16. (canceled)

17. (canceled)

18. (canceled)

19. (canceled)

20. (canceled)

21. (canceled)

22. (canceled)

23. The engineered system of claim 12, wherein the one or more reverse transcriptase comprises (Y/F)XDD (SEQ ID NOS: 1-2), wherein X is any amino acid.

24. An engineered system comprising a retron or one or more molecules encoded by the retron.

25. The engineered system of claim 24, wherein the retron is an Ec67 retron, Ec86 retron, or Ec78 retron.

26. (canceled)

27. (canceled)

28. The engineered system of claim 24, wherein the retron is a Tol/interleukin 1 (TIR) domain-associated retron.

29. The engineered system of claim 28, wherein the TIR domain has NAD+ hydrolase activity.

30. The engineered system of claim 24, wherein the retron is a topoisomerase-primase (TOPRIM) domain-associated retron.

31. The engineered system of claim 30, wherein the TOPRIM domain has nuclease activity.

32. An engineered system comprising:
an NTPase of a STAND (signal transduction ATPases with numerous associated domains) superfamily;
an NTPase of a STAND superfamily, DUF4297, Mrr-like nuclease, SIR2, a trypsin-like serine protease, and/or a helical domain;
von Willebrand factor (VWF), a PP2C-like serine/threonine protein phosphatase, and a serine/threonine kinase;
SIR2;
transmembrane ATPase;
ATPase, QueC synthase n, and TatD endonuclease;
S8 peptidase;
DUF4011, a helicase, and a Vsr endonuclease;
a silent information regulator (SIR)2-DUF4020;
SIR2-STAND-TPR;
a Polymerase and Histidinol Phosphatase (PHP)-ATPase;
SIR2 and HerA;
DUF1887;
DUF499, DUF3780, and DUF1156 methyltransferase and a helicase;
a Type I-E CRISPR-associated ATPase; or
ApeA.

33. (canceled)

34. (canceled)

35. (canceled)

36. (canceled)

37. (canceled)

38. (canceled)

39. (canceled)

40. (canceled)

41. (canceled)

42. (canceled)

43. (canceled)

44. (canceled)

45. (canceled)

46. (canceled)

47. (canceled)

48. (canceled)

49. The system of claim 1, wherein the system comprises two proteins fused together.

50. The system of claim 1, comprising one or more components in a retrotransposon system.

51. A polynucleotide comprising coding sequences for one or more proteins in the system of claim 1.

52. A vector comprising a polynucleotide of claim 51.

53. A cell comprising the polynucleotide of claim 51.

54. A method of identifying a defense system in a microorganism, the method comprising:
identifying genes of known defense systems in a plurality of genomes of the microorganism;
recording candidate genes located within 10 kb or 10 open reading frames from the identified genes of known defense systems in the genomes;
identifying homologs of each candidate gene in the genomes; and
selecting candidate genes wherein at least 10% of homologs of the candidate genes are within 5000 nucleotides or 5 genes from one or more known defense systems on the genomes.

55. The method of claim 54, wherein identifying genes of known defense systems comprises identifying known defense genes and filtering false positive hits among the identified known defense genes.

56. The method of claim 54, further comprising validating the selected candidate genes.

57. The method of claim 54, wherein the homologs of the candidate genes share at least 70% sequence identity with the candidate genes and/or the homologs have an E-value of 10⁻⁵ or lower.

58. The method of claim 54, wherein the recorded candidate genes are within 10 kb from the identified genes of known defense systems on the genomes.

59. The method of claim 54, wherein at least 15% of homologs of the selected candidate genes are within 5000 nucleotides or 5 genes from one or more known defense systems on the genomes.

60. The method of claim 54, wherein the plurality of genomes comprises at least 100,000 genomes.

61. The method of claim 54, wherein the known defense systems comprise one or more of a CRISPR system, Type I RM and McrBC system, BREX-associated system, Zorya system, Wadjet system, Druantia-associated system, Hachiman system, Lamassu system, Thoeris-like system, Gabija system, Septu system, pAgo system, Shedu system, Kiwa system, DUF499-DUF1156 system, and Toxin/antitoxin system.

62. The method of claim 54, wherein the microorganism is E. coli.

The application's sequence listing, which the Patent Office published only in electronic form, follows.

SEQUENCE LISTING (480 sequences)

SEQ ID NO: 1 - protein, 4 aa, Artificial Sequence
  Synthetic
  misc_feature (2)..(2): Xaa can be any naturally occurring amino acid
YXDD

SEQ ID NO: 2 - protein, 4 aa, Artificial Sequence
  Synthetic
  misc_feature (2)..(2): Xaa can be any naturally occurring amino acid
FXDD

SEQ ID NO: 3 - DNA, 13703 bp, Escherichia coli
acagcaccacgttcatcttccttttttaactgattttacagagactttaatacagttaaaattttatttcctgagctgtaatcgattaagttgatgcatttaatgggaatgatatagggtcatttccagtctcacttatagaaatggctaaagcatgactctcgccaaaaccgtttatgtgttgtacataacgcgatcatccctctcacaaattgccttttctcatggcatctcgcccggtcccccattacaatcactttttgttttttgcgagctgcattccagtcttcagagggtttttcgatgattaaaaatgacaaggcatggataggagacttgctgggcggaccgctcatgagcagggaaagccgcgtcattgccgaactgttgctaaccgatcccgatgaacagacatggcaagagcaaattgttggccacaacattttacaagcctcttctcctaacaccgcaaaacgttacgcggcaacaatcaggcttcgcctgaacacgctggataaaagcgcgtggacattgattgccgaaggtagtgaacgggaacgccaacaacttctgtttgtggctctgatgctacattcgccggtagttaaggattttctggctgaagtggtgaacgatctgcgcaggcagttcaaggaaaagttgcctggcaatagctggaacgaatttgtgaatagccaggttcgcctacatccggtactcgccagctactcagattcatctattgcaaaaatgggaaacaatctggtgaaggcgcttgctgaagcgggttatgtggatacgccccgcagacgtaacctgcaggcagtttaccttttaccggaaactcaggcagtgttacagcgcctgggacaacaggacttgatatctattctggagggaaaacggtgatagatcccgttcttgaatatcgcctgtctcaaatccagagtcgcattaacgaagatcgcttcctcaaaaataacggctccggaaatgaaattggtttttggatctttgattatcccgcgcagtgcgaactgcaggtacgggagcatttgaaatatctgctccggcatctggaaaaggaccataaatttgcctgtctgaatgtcttccaaatcatcatcgatatgctcaatgaacgcggccttttcgagcgcgtctgccagcaggaagtcaaagtgggtactgagacgctgaaaaagcagcttgctggtccgttaaatcagaaaaagatcgctgattttatagcgaaaaaagtcgatctggctgcccaggattttgtcattcttaccggcatgggcaacgcctggccattagtacgcggtcatgaactgatgagtgccttgcaggatgtcatggggttcaccccactgctgatgttttatcctggcacctacagcgggtacaacctttccccgctcacagacaccggttcacaaaattattatcgcgctttcagactggtaccagatacgggacccgcagcaacattgaatcctcaatgaagagcataacaatgaatattgaacagatttttgaaaaacctctaaaacgaaatataaacggggtagtcaaagcagagcaaaccgatgatgccagcgcgtacatcgagttagatgaatatgtcatcacccgcgaactggaaaaccatcttcgccatttcttcgaatcctatgttcctgccactggcccggaacggatccgtatggaaaacaagatcggcgtatgggtttcaggcttcttcggttcaggtaaatcgcactttattaagattctttcttatcttttatctaaccgcaaagttacacataacggtacggaacgtaatgcttactccttctttgaagataaaatcaaagatgcattattccttgccgatattaacaaagcggtgcattacccgactgaagtcattctgttcaatattgattcgcgtgccaacgtagatgacaaagaagatgccattcttaaagtcttcctgaaagttttcaacgaacgcattggatactgcgctgattttccgcatattgcccatcttgagcgcgagctggataaacgcggtcagtatgaaacctttaaagccgcgtttgccgatatcaatggctcgcgctgggaagacgagcgcgacgcttactacttcatcagcgatgacatggcacaagcattaagccaggccacgcagcagagtcttgaatcctcccgccaatgggtggaacaactcgacaaaaacttcccgctggatatcaataatttttgccagtgggtaaaagagtggctggatgacaatggtaagaacatcctctttatggtggatgaagtcggtcagttcattggcaaaaatacgcaaatgatgctgaagctgcagactattactgaaaaccttggggtaatttgcggtggccgcgcatgggttatcgtgacttcgcaggccgatatcaacgcggcaatcggtggtatgagcagtcgcgacggacaggacttctccaagatccaggggcgcttctctacacgcctgcaactttccagctctaacacatcagaagttatccagaaacgtttgttggtaaagactgacgaagcaaaagcggcactggcaaaagtgtggcaagagaaagccgatatcctgcgtaaccagctggcttttgacactacaacaactactgcactacgtccttttaccagcgaagaagagttcgttgacaactacccgtttgtcccgtggcactatcagattctgcaaaaagtgtttgaatctattcggacgaaaggtgcagcgggtaaacaattggccatgggtgagcgttctcagctggaggcattccagacggcggcgcagcaaatctcagcgcaagggctggattctctggtgcctttctggcgcttctatgccgccattgagagcttcctggaacctgccgttagccgcaccatcactcaggcttgccagaatggcattcttgatgagttcgatggcaacctgcttaaaacgctgttcctgatccgctatgtggaaacgctgaaaagcaccctggataacctggtcacattgtctatcgataggatcgatgccgataaagttgagttgcgccgccgggtcgaaaaaagtctcaacacgcttgaacgcctgatgctcattgcgcgcgttgaagataaatatgtgttcctgaccaacgaagagaaagagatcgaaaacgagatccgtaacgttgatgtcgatttctctgcgatcaacaaaaaactggcatcgatcatctttgatgacattctgaaaagccgtaaatatcgttatccggctaacaagcaagactttgatatcagccgcttcctgaacgggcatccattagacggcgcagtgcttaacgatctggtggtgaagatcctgacccctaaagatccgacttattcgttctataacagcgatgcgacctgtcgcccttatacgtcagaaggcgacggctgtattttgattcgtctgcccgaagagggccgtacctggagcgatattgatttagtcgtccagactgaaaagttcctcaaagataacgccgggcaacgtccggaacaggcaaccctgctctcagaaaaagcgcgtgaaaacagcaaccgggaaaaattactccgtgttcagttggaatcactacttgcagaagcagacgtctgggcgattggcgaacgcttaccgaaaaaatcctccacgccatcgaacattgtcgatgaagcctgccgttacgtgattgaaaacaccttcggcaagctgaagatgctgcggccttttaacggtgacatctcccgtgaaattcatgcattactgacggttgagaacgacaccgaactggatctcggtaacctcgaagagtccaaccccgacgccatgcgcgaggtagaaacctggatcagcatgaatatcgaatacaataaacctgtgtatttacgcgatattctgaaccattttgcgcgtcgcccttatggctggcccgaagacgaagtgaaactgctagtagcccgtctggcctgcaaaggtaaattcagcttcagccagcaaaacaacaacgtcgagcgaaaacaggcgtgggagttatttaataacagccgccgccatagcgaattgcgtctgcataaagttcgccgtcatgatgaagcgcaggtgcgtaaagccgcgcaaaccatggctgacatcgctcagcagccgtttaacgaacgggaagagccggcgctggttgaacatattcgtcaggtatttgaagagtggaagcaagagctgaacgtattccgcgccaaggcagagggcggaaacaatccggggaaaaacgagattgaatccggtctgcgcctgcttaatgccattcttaatgagaaagaagattttgccctgatcgaaaaagtctcatcgctgaaagatgaacttctggatttcagcgaagaccgtgaagatttggtcgacttctaccgtaagcaattcgccacctggcaaaaactgggtgctgcgctgaatggcagctttaaatctaaccgcagcgcgctggaaaaagacgccgcagcggttaaagcgctgggcgagctggaaagcatctggcaaatgccggaaccttataagcatctcaatcgcatcacgccgttgattgaacaggtccagaacgtcaaccatcagttagtcgaacagcatcgccagcacgccctcgaacgcattgacgcccgcattgaggaaagccgtcaacgcttgctggaagcgcacgccacgtcggagctgcaaaacagcgttctgctgccgatgcaaaaagccagaaaacgcgctgaagtcagccagtcgattccggaaattttggcggaacagcaagagacaaaagcgctgcaaatggatgcagataaaaagattaacctgtggatcgacgagctgcgtaaaaagcaagaagcacaactccgggcagcaaatgaagctaaacgcgctgccgactcagaacagacttatgttgtggtggaaaaaaccgttatccaaccggtaccgaaaaaaacgcatctggtgaatgtcgccagtgagatgcgtaatgccaccggtggtgaagttctggaaacgaccgaacaggtggaaaaggcgctcgacacgttacgcacaacgctgctggccgtcattaaagcaggcgatcgcattcgccttcagtaactcccatttcagggcagcactctgctgccctttgcaggattttctatgaataccaataacattaaaaaatatgccccacaggcccgtaacgacttccgcgatgcggtgatccagaagctaacgacgcttgggatcgctgcagataaaaaaggcaatttgcagattgccgaggccgaaaccattggcgagaccgtgcgttacggtcagtttgattacccgttatcgacccttccccgccgcgaacggctggtaaaacgcgcccgtgagcagggttttgaggtgctggttgagcactgcgcctacacctggtttaaccgcttatgtgcaattcgctatatggagctacacggttatcttgagcacggcttccgtatgttgtcccacccggagacgccgaccgcgtttgaggtgctggatcatgtgccggaagtggcagaagccctgctgccggaaaataaggcgcagctggttgaaatgaagctttccggtaatcaggacgaagccctgtaccgcgaactgctgctggggcagtgccacgccctgcaccacgcgatgccgttcctgtttgaagcggtagatgacgaagcggaactgctgttgccggataacctgacccgtaccgactctattctgcgtgggctggttgatgatattccggaagaagactgggagcaggtagaggttatcggctggctgtatcagttctatatttcggaaaagaaagatgccgtgattggcaaagtggtgaagagcgaagatattcctgccgccacccagctgtttacgccaaactggattgtgcagtatctggtacaaaactccgttggccgccagtggttgcagacctacccggactcgccgctgaaagacaaaatggagtactacatcgagcctgcggaacaaacgccggaagtgcaggcgcagctggcggcgattaccccagccagcattgaacccgaaagtattaaagtgctcgacccagcctgcggctccggtcatattttgattgaagcctataatgtgctgaaaaatatctacgaagagcgtggttatcgcgggcgtgatattccacaactgattctggaaaataatatttttggtcttgatatcgacgaccgcgcggcacagctttccggctttgcattattaatgatggcgcgtcaggatgaccgcagaatatttacccgcgatgtacgtctgaatattgtctctttgcaggaaagcctgcatctggatatcgccaaactctggcagcaactgaatttccaccagcaggtacaaaccggcagtatgggggatatgtttgctgaaaataacgcgttaacccaaactgacagcgcagaatatcagctgctgatgcgcacgctgaaacgctttgtgaatgcaaaaacgctgggctcactgattcaggtgccgcaggaagaagaagcggaactgaaggtattcctggacgcgttgtatcgcctggaacaggaaggcgatttccagcagaagacggcggcaaaagcgtttattccgtttattcagcaggcgtggattttagcgcagcgatatgatgcggtagtggcgaatccgccgtatatggggggtaattatatggagacagaacttaagaatttcgtctcttcttactaccctcaaggaaaggcggatctttattcttcatttatggtcagattacttttacaattaaaagataatcgcactttaagcctaatgaccccctttacttggatgaatttatcatcatttgaagagctccgaaaaattatacttacaaatttcagcattcagtcattagtacagcctgaatatcattcattttttgagtcagcttatgtcccaatttgtgcttttagcatttcaaataccccattaagctggaatgcaaaattttttgatttatcagatttttatggagaaaaaaatcaagctccaaattttcagtatgcaattaaaaatgacaataaatgtcattggaaatataacagaatcaccacggactttctatgtactcccggatatatcattgcttactctctgcctgattctgcgttatcttgcttcaaaacatccaaaaaacttcatgatgtttgcaatctaaaacaaggattaattactggtgataatgaaagatacctaagattctggcatgaaatcagctataactctttcagtctcaatgaaaaaagaaaaaaaacaaaatggttcccatatcaaaaaggtggtgcataccgtaaatggtatggtaataatgattatgttgttgactgggagaatgatggttattccattaaaaacttttataatgacaaaggtaaattacgctcacgccctcaaaacatacaattttattgtaaagagggtttaacatggacaagtttaactatttcgtcactatcgatgagatatgtaccaaatggatatatttttgatgcaaaaggacctatgtgttttccgaaatcctctttggatatctggaatattcttggctatgcgaatagcaaagtaatagatatatttctcaaacaattagcgcccaccatggattattctcaagggcctgttggaaatgtcccattcaaatttaacgatggtgatttgaacgagataataaaagaactcgtaaacattcacaaacgtgactgggatgaaaatgaaacatcttttgagtttaagagagatatgttggttcatttttcaagagatattaacactattaagggtagttttacactaaggcaaggggaaaataaaaaagcgattaacagaacaaaatttttagaagaaatgaataactctttctttataaattgctttaatctaactgatattttatctccagaaattgaactaaacaaaatcacgttaacgcatgcaactattgaaattgatattcaaaaaataatttcatatgcaataggctgccaaatgggacgttactcccttgatcgcgaaggtctggtatacgctcatgaaggcaataatggcttcgccgatcttgtcgccgaaggtgcttataaaagcttcccggctgatagtgacggcattctgccgctaatggatgaagagtggtttgacgatgacgtcacctctcgcgtcaaggagtttatccgcaccgtttggggcgaagaatatttgcgcgaaaacctcgattttatagccgaagttctcaagcccaaaaaaggcgaatctgcgctggagaccattcgtcgctatctttccacccagttctggaaagatcatctgaaaatgtataaaaagcgtccaatctactggctattcagctccggtaaagagaaagcgtttgagtgcttggtgtatctgcatcgctataacgatgccacgctgtcgagaatgcgtaccgaatatgtggtgccgctgctggcgcgttatcaggccaatattgatcgcctgaacgatcaacttgatgaggcttctggcggtgaatccacacgtctgaaacgcgaacgcgacagcctgatcaaaaaattcagcgaactgcgcagctatgacgatcgcctgcgtcactatgctgatatgagaatcagtattgatctcgacgatggcgttaaggttaactacggcaagtttggcgatctgctggcagatgtcaaagccatcaccggcaatgccccagaggtgatctaaaccagacggcacgttctcctgttgccgggttctgcccggtggcaaataccaccgggaaacgcgccgctgctgacatttctccacctcacttcatgataaaatgcgccaccgtgtcaaaatctccttttcgcgttttggcgctttcttattcatcgtaacaacatgggattgtgaacttgcaaaatcaggactttattgctggccttaaagctaaatttgccgaacatcgcatcgttttctggcacgatcccgataaacgttttattgaggaactggaacagctcaagcttgaaagcgtcacgctaatcaacatgacccacgagtcacagctggcggtaaaaaaacgcatcgagattgatgagccagaacagcagttcctgctgtggttcccccatgatgcgccgcctcatgaacaagactggctgctggatatccgcctttacagcagcgaattccatgccgattttgccgccatcaccctgaacacgctgggcattccccagcttggcctgcgcgagcatattcagcgacgcaaggccttcttcagcactaaacgcacgcaggcgctgaaaaatctggcgacagaacaggaagatgaagcctcgctggataagaaaatgattgcggtgatcgctggcgcaaagaccgcgaaaaccgaagacattttgttcaacctgattacccagtacgttaaccaacaaatagaagacgacagcgaactggaaaacacgcaggcgatgctgaaacgccacggtctggactcggtattgtgggaaatgctcaaccacgaaatgggctaccaggcagaggagccatcgctggaaaacctgctcctgaaactgttttgtaccgatctctctgcccaggccgacccacagcagcgcgcctggctggaaaaaaatgtcctgctgacgccatccggcagagcatctgccctggcatttatggtgacctggcgtgccgatcgtcgctataaagaggcttatgactactgcgctcagcaaatgcaggccgccctgcacccggaagatcattaccgactcagctcgccgtatgatttgcacgaatgcgaaaccaccctcagcatcgaacaaaccattattcatgcgctggtaacacagctgctggaagagagcaccacgctcgatcgggaagcctttaaaaaactgctctctgagcgccagagcaaatactggtgtcagacacaaccagagtattacgccatctatgacgcattgcgccaggctgagcggttgctgaacctgcgcaatcgccacatcgatggtttccactaccaggacagcgccaccttctggaaagcctactgcgaagaactgttccgcttcgaccaggcttatcgcctgtttaatgaatatgccttgctggttcacagcaaaggagcgatgatcctcaagagcctggatgattatatcgaggcgctctacagcaactggtatctggcagagttaagccgtaactggaacgaagtgctggaagcggaaaatcgtatgcaggcgtggcaaatccctggcgtgccgcgtcagcagaacttcttcaatgaggtggtgaagccacagttccaaaatccgcaaatcaaacgcgtgttcgtgataatttccgatgccctgcgttatgaagtggcggaggagctggggaatcaaatcaataccgagaaacgctttaccgcagaactgcgctcgcagctcggcgtgctccccagctacacccaactgggaatggcggcattgctgccccatgaacaactttgctatcaacccggtaacggcgacatcgtttatgctgatgggctgtcgacctcgggtattcctaaccgcgataccattctgaagaactataagggaatggcgataaaatcgaaggaccttctggagttaaaaaatcaggaagggcgagaccttattcgcgattacgaagtggtgtatatctggcataacacgattgatgccactggcgacacggcatccacggaagataaaaccttcgaagcgtgccgcacggcggtggctgaactgaaagatttagtcaccaaggtgatcaaccgcctccacggcacacgcatttttgttacggcggatcacggtttcctgttccagcaacaggcgctttcggttcaggataaaaccactctgcaaattaagccggaaaacaccatcaagaaccacaaacgctttattatcggccatcagcttcccgccgatgatttttgctggaaagggaaagtggcggataccgcaggcgtgagcgacaacagcgagttcctgattccgaaagggatccagcgcttccatttctctggcggcgcgcgcttcgttcatggcggcaccatgttgcaggaggtttgcgttccggtattgcagataaaagccctgcaaaaaaccgccgcagaaaaacagccacagcgccgcccggtggatattgtcgcttaccatccgatgattaagctagtgaacaatatcgataaagtgagcctgttgcagacgcatccggtgggcgaactttatgaaccgcgtatcctgaacatttacattgtcgacaacgccaacaatgtggtctcgggcaaagagcgcatcagctttgacagtgataacaacaccatggaaaaacgcgtacgcgaagttacgctgaagctgattggcgctaacttcaaccgtcgcaatgagtactggttgatactggaagacgcacaaacggaaacggggtatcagaagtacccggtcattatcgatctggcgttccaggatgatttcttctaagtgaggcgatatgcaaacccatcatgatttacctgtttcaggcgtatccgcaggggaaattgcctccgagggttacgatctggacgccctgctgaaccagcattttgctggtcgcgtggtgcgtaaagatctcaccaagcaactcaaggaaggggcaaacgtcccggtgtatgtgcttgagtatctgctcggcatgtactgcgcctctgacgatgacgatgtggtcgagcaagggttgcaaaacgttaagcgtattctggctgataactatgtgcgcccggatgaagcggagaaagtgaagtcgctgatccgcgagcgtggttcgtacaaaatcatcgataaagtgtcggtgaaactgaaccagaaaaaagacgtttacgaagcccagctttctaacctcggcatcaaagacgcgctggtgccctcgcagatggttaaagacaacgagaagctactgacgggcggtatctggtgcatgattaccgtcaactatttctttgaagaagggcagaagacctcacccttctcattgatgacgctcaagcctatccagatgccgaatatggatatggaagaggtgttcgatgcgcgtaaacactttaaccgtgaccagtggatcgatgtgctgctgcgctcggtgggtatggagcccgccaatattgagcaacgcaccaaatggcaccttatcacccgtatgatcccgttcgtggagaacaactataacgtttgcgagctggggccgcgtggcaccggtaaaagccatgtgtataaagagtgttctcctaactccctgttagtttccggcgggcaaacgaccgttgccaacttgttctacaacatggccagtcgccagatcggcctggttggcatgtgggatgtggtagcgttcgacgaagtcgcggggatcactttcaaagataaagacggcgtgcaaatcatgaaagattacatggcgtcaggatctttctctcgcggcagagattcgattgaaggtaaagcgtcgatggttttcgtcggcaacatcaatcaaagcgtagagactctcgttaaaaccagccatttgctggcaccatttccgactgcgatgattgatacagcatttttcgaccgctttcatgcctatattcccggttgggaaatccccaaaatgcgcccggaattctttaccaaccgttacgggctgattacggattatctcgctgaatatatgcgcgaaatgcgcaaacgcagtttctctgatgcgattgataaattctttaagctgggtaacaacctcaaccagcgtgacgttattgccgttcgacgtaccgtgtcggggttgttaaaactcatgcatcccgatggcgcgtacagcaaagaagatgtgcgagtctgcctgacctatgcgatggaagttcgccgccgcgtgaaagagcaacttaaaaaactgggcggtctggagttcttcgatgtgaactttagctacatcgacaacgaaacgctggaagagttttttgtgagcgtaccggaacagggcggcagcgaacttattcctgccggaatgccaaagccgggtgttgtgcatctggtcactcaggcagaaagcggcatgaccgggctgtatcgttttgaaacacagatgactgccggtaatggtaagcatagtgtatcgggtctgggttcaaatacctccgcgaaagaagctatccgcgtcggtttcgattacttcaaaggcaatttgaatcgggtaagcgcggccgcgaaattctccgatcatgaatatcaccttcatgtcgttgaactgcataatactggcccaagcaccgcaaccagtcttgctgcgcttatcgctttatgttcgatattgctggcaaaaccggtgcaggaacagatggtggtgttgggcagtatgacgcttggtggggtaattaacccggtgcaggatcttgccgccagtttgcagctcgccttcgacagcggtgcaaaacgggttctgttgccgatgtcctcggctatggatattccaacggttccggcagagttatttaccaagtttcaggtgagtttttactcagacccggttgatgctgtttataaggcgctgggtgtgaattaacgtagtaactattttaatgaac

SEQ ID NO: 4 - DNA, 11823 bp, Escherichia coli
ggtgaacgtttggttgatagggtagtaaaactagtaatcatcctataattagctatattcgtggttattagattgaaaacagataacattaacaaaatctataaatcgatttgaatgatttttttcatcaatactgttgtaagctcctgctatcaaaagttttgcacacaatctataagctcccagaattgcttgtataaatgctatcattggcgctgtcccgatcgagggagcaaggaggggactctcttgtgccatgcgattaatcactggggctctaagtgaaatttagtgggactaaatactaattggaacgtgagataaaaatgcacaaatatccctctataatagttaatatcaaccttcgagaagccaaactgaaaaagaaggtacgtgagcatttacaatccttgggttttacaagatctgattctggagcgctccaggccccgggaaataccaaagatgtaatacgggctcttcatagttctcaacgagctgagcggatatttgcaaaccaaaagttcataacgctaagagcggcaaagcttattaaatttttcgcatccggcaatgaggtcattccggataagatttcaccggtacttgaacgtgtaaagtcaggaacctggcaaggagatctctttaggttagcagcattaacttggtccgtacctgtttcaagcggatttggaaggcgtctccggtatcttgtatgggatgaaagcaacggaaaattgatagggctgatcgcaattggtgaccctgtgttcaaccttgcagtccgagataatttgattgggtgggatactcatgccagaagttcccggcttgttaatttgatggatgcatacgtcctcggtgctcttcccccttataatgccctgctgggaggaaaattaattgcatgtctgcttcgtagccgcgatctttatgatgactttgcaaaggtctatggtgataccgttggagtaatatctcaaaaaaagaaacaagcacgtcttttggctattacaacaacatcgtctatggggcgctcatcggtatataaccgtttaaagctggatggaattcaatatttaaaatcgattggatatacaggcggttgggggcattttcatatacctgatagcttgttcattgaattacgtgattacttacgtgatatggatcacgcttatgcagatcattatatgtttggtaatgggcctaactggcgtttacgtacaactaaggcagctttaaatgcactaggatttagagataatttgatgaagcatggaattcaacgtgaagtgtttatcagtcagctagcagaaaatgcaactagtattctgcaaacaggcaaaggtgaaccagatctaacctctttgctttctgctaaagagatagctgagtgtgcgatggcacgatggatggttccacgatcaattcgcaatccagaatatcggctttggaaagcaagagatctatttgattttattagtaatgactcgctaaactttcccccgtttgacgagatagcgaaaacagttgtctaatcttaactgaagggggagtaagtgaattacgctattgataagttcaccgggacactgatattagcagctcgagcaacgaaatatgctcaatatgtttgcccagtttgtaaaaaaggtgttaacctccgtaaagggaaggttatacccccatattttgctcatttgcccggacatggtacgtcagactgtgaaaattttgttcccggaaattctatcattgtcgaaactattaaaactatttcaaagcgatatatggatttgcgcttattgattcctgtcggaagtaatagtcgagagtggtcattagaattagtgttgccaacctgtaatttatgtagagcaaagataacgttagatgtaggaggcagaagccaaacgcttgatatgaggagtatggtaaagagtcgccagattggtgctgaattatcagtaaaatcttaccgtattgtttcatatagtggtgaaccagatccaaaatttgtaacagaagttgaaagagaatgcccaggtttaccttctgagggagcagcagttttcactgctttagggcgtggggcatcgaagggatttccacgagcacaagagttaagatgtactgaaacatttgcctttctttggcgacaccctgttgctccagattttcctgatgaattagaaataaaaagtttagctagtaaacagggatggaatttagctcttgttacaattcctgaagtcccttctgtggagagtatttcatggctaaaatcttttacataccttcctgttgttcctgccagaacatctattacagcaatttggccgttcctaaatcaaaaaacaagtattaatcatgtcgaatgtgtttattctgacacaatattgttgtcaacaaatatggcaccaacatcatcagaaaatgttggaccaactatgtacgcacaaggttcctctttattactttcagcggttggtgttgaaacatcacctgctttcttcattctaaatcctggagaaaatgactttgtgggcgtttctggctcaattgagcaggacgtaaacttatttttttctttctataaaaaaaacgtttctgtacccagaaaatatccctcaatagatttggtttttactaagaggaataaagaaaagaccatcgtttccttacatcaaagaagatgcattgaagttatgatggaagcacgaatgtttggccataaattagaatacatgtctatgccttctggtgttgaaggagtggcaagaattcaaagacaaactgaaagtaatgttattaagttagtttctaatgatgacattgcagctcatgataagagcatgcggttactatctcctgttgcgttatctcaattatctgattgcttagcaaacttaacatgtcatgtagaaatagattttttaggtcttggtaaaatatttttacctggttcttctatgctatcattagatgacgggaaatttattgaattatctcctaatcttcgctcacggatattaagttttatacttcaaatggggcacaccctccatggttttagtttaaataatgattttttattagttgagaaattagtggatttgcagccggaaccacacttattaccgcattatagagcattggtaaaagaagttaagaccaatggatttgaatgtaaccgctttagataaggtgccttcgaatgagttaccaatatagccaagaggcaaaggaacggatctctaagttgggacaatccgaaattgttaactttatcaatgagatttctccaactttacgacgtaaagcttttggttgtttaccaaaagtaccgggattcagggcaggacatcccactgaaattaaagaaaaacagaaaagattgattgggtatatgttccagtcacatccttcctctgaggagagaaaagcatggaaaagtttttctcttttttggcagttttgggctgaagagaaaattgacaaatcatttagtatgattgataatttaggattaaaagaaaactctggctctatttttattagagagcttgctaaaaactttcctaaagttgctagagagaatatcgagcgcctgtttatctttagtgggtttgctgatgatccagacgttataaatgcatttaacctttttcctcctgcagttgttcttgcccgcgatatcgtgattgatactcttccaattcgtttagatgagcttgaagcacgtattagtttaattgccgataatgttgagaaaaaaaataatcatattaaagaacttgagttaaaaatagatgctttttccgaacagtttgataattactttaataatgaaaagagcagtttaaaaataattaatgaactacaatctttgataaactcagagactaaacaatctgatattgctaataaagctattgacgagctttatcattttaatgaaaaaaacaaacagctaatattatctcttcaagaaaaattagattttaatgctctggctatgaatgatatttctgagcatgaaaaattgataaaaagtatggctaatgacatttcagaatttaaaaatgcattaacgatcttgtgtgataataaaataaagaataacgagttagattatgtcaatgaattaaaaaaactcactgaacgaatagatacacttgaaataaacacatctcaagctagcgaagtgagtgtcaccaatagatttacaaaattccatgaaatagcgcactatgaaaattatgagtatctttcatcctccgaagacatatctaatagaatttctttaaatttacaggctgttggattgacaaaaaattcagcagaaaaattggctagattgacattagctaccttcgtttctggacaaatcattcaattcagtggctctttggcagatattatcgcggatgcaattgccattgctattggtgcaccacgttatcacatatggagagttccagttggtattatttctgacatggatgcttttgattttatagagactatagctgaatcatctcgctgtctccttttgaaaggggccaatctttcagcatttgagatttatggagcggcaattagagatatagttgttcaacggcaaatacatccaacaaattatgaccatctggcattgatagctacctggaaacaaggcccagctacattccctgatggaggaatgttggccgagttgggacctgttattgatactgatacattaaaaatgcgtggtttatcagctactttaccccaattgaaaccaggttgtcttgccaaggataaatggacaaatattgatggactacatcttgatagtgttgatgattatgtagatgaattaagagcattactggacgaagctggatttgatgggggaactttgtggaagagaatgattcatattttctatacttcactcataaggatccctaatggaaattatatttatgatctttattctgtcttgtctttttatactcttacatgggcaaaaattaaaggtggccccgtccaaaagatagaagatattgccaatcgtgaattaaaaaattatagtgcaaaaatatcttcttgaggaggtggttaatggagtggagagcagtatcacgagacaaagcactggatatgttatcaactgcattaaattgtcgatttgatgatgaagggttgagaatttcagcagtttcagaatgcttaaggagcgtattatatcaatattctatatctgaaacagaagaagctaggcaaactgtaacctcgcttcgactcactagtgcagtaaggcgaaaattggtacctttatggccagacattgctgatattgataatgctatacatccgggcattatgtctatattgaacagcttggctgaattgggtgacatgattaagttagaaggtggtaattggctaacagctcccccacatgcagtacgaattgacaataagatggctgttttttttggtggagagccttcctgtacattttcaacgggcgtggtagctaaatctgctggaagagttcgcttggttgaagaaaaagtgtgtactggaagtgttgaaatctgggatgcaaatgagtggattggtgccccagcagaaggcaatgaagaatggtcatccagactactatctggaactatttccggctttatcgatgcacctggcaatatgagtgaaacgactgcatatgtgcggggaaaatggctccatttgtcagaactttcttttaataaaaagcaaatctacttatgcagaatgtccgttgataatcacttttcctattatttaggagaaattgaagctggacgcttatgtagaatgaattcgttagaatcgtctgatgatgtcagaagattacgtttttttctcgatacaaaagataattgtccgctaaaggtccgtatcaaaatatctaatgggctagcaagattaagattaaccagaagattaccaagacgagaaacgaaggtactcctgctaggctggagagaatcaggttttgaaaatgaacattcaggaataacacaccatgtattccccgaggaaatattacccatagtgcgtagcgcttttgaagggcttggtattatttggattaacgaattcacgcgacggaatgaaatatgattaataaaaataaagtaactgaacgttcaggtatacatgataccgtgaaaagccttagtgaaaatctgagaaaatacattgaggcacaatatcatatccgggatgaagggttaattgctgagcgacgagcgcttttacagcaaaatgaaactattgctcaagctccttatatagaagcaaccccaatttatgaacctggtgcgccatacagtgaattgcctattcccgaagcagcaagtaatgtgctaactcaactatcagaacttggaattggcctctatcaacgcccctataaacaccaatcacaggcacttgagtcatttcttggcgaaaacgcttctgatctggtcattgcaacaggtacaggctccggtaagactgaaagctttctaatgccaattattggaaaattggcgattgaatcttccgagagacctaaatctgcatcccttccaggttgtagagcaattttattatatccaatgaatgcattagttaacgatcaacttgctcgtatcagacgtctttttggtgattctgaagcctctaaaatactgagatctggaagatgtgcccctgtacgctttggcgcttatacgggaagaacgccttaccctggtcgtcgtagctctagacgagacgagctttttatcaaaccccttttcgatgagttttacaataaactcgcaaataacgcccccgtacgtgcggaactgaaccgcattggtcgctggccaagtaaagatcttgatgctttttatgggcaaagcgcatctcaggctaaaacctacgtctcaggcaaaaaaacgggtaagcaatttgttttgaacaattggggggagaggctaattacccagcctgaggatcgtgagctaatgacccggcatgaaatacagaatcgctgtccagaattactgataacgaactactccatgcttgagtatatgctgatgcgacctatcgagcgtaatatttttgagcagactaaggaatggctcaaagctgatgagatgaatgagcttatcttagtgcttgatgaagcgcatatgtatagaggagcagggggagcagaggtagcccttttaatacgtcgcctctgtgctcggttggatattccccgggaacgtatgcgctgcatccttaccagtgctagtctagggtccattgaggatggagaacgttttgcccaagacttaactggcttatcaccaacctcttcgaggaaatttcgaattattgagggtacaagggaatcgcgtcctgagtcacaaattgttaccagtaaagaagctaatgcactggctgaattcgacctaaattcatttcagtgcgtagctgaggatcttgaatctgcatatgcagcaatagagtctcttgccgaacgaatgggctggcaaaagccgatgataaaagatcatagtacactacgtaattggttatttgataatttgactggttttggtcctattgaaacgcttattgaaatagtttcaggtaaagcggttaagctaaatatcttgagtgaaaacctttttccagactctccacagcaaatcgcagagcgagcaacagatgcattactcgcattgggttgctatgctcagagggcatccgatggcagagtgcttattccaactcgcatgcatcttttttatcggggattaccaggtctttatgcctgtatagatcccgattgtaatcaacgtttgggtaaccatagcgggccaactatacttggccgcctttatacgaaaccactggatcaatgtaaatgcgcttcaaaagggcgagtctacgaattatttacccaccgtgactgcggtgcggcttttattcgtggatacgttagttccgaaatggactttgtatggcaccagccgaacggaccattatcagaagatgaggatatcgatcttgttcccatagatatattggtcgaggaaacacctcatgtacatagtgattaccaggacagatggctacatatagcaacaggacgcctttctaaacagtgtcaagatgaggattctggttatcgtaaagtctttatacctgaccgagttaagtctggatcagaaattacatttgatgaatgccctgtttgtatgcgtaagacaagaagtgctcagaatgaaccgtctaaaattatggatcatgttacaaaaggggaagcaccttttacaacgttagtacgtacacagatatctcaccagccagcgagtcgtcctattgatggtaaacatcccaatgggggaaaaaaagtacttattttttctgatggccgacaaaaagcagctcggcttgcacgtgatattcctagagatattgagcttgatttgtttcggcaatccattgctctcgcctgttctaaactgaaagatatcaatcgggaacccaaaccaacatcagtactttaccttgctttcctatcagtcctttctgaacatgacttgcttatttttgatggggaagattcacgaaaagttgtaatggcccgtgatgaattttatcgtgattataatagcgatctggctcaagcttttgatgatagcttcagcccccaagagtcaccgtcacgatataaaatagcgttgcttaaacttttatgtagcaattactattctctttccggaacaacagttggttttgttgaaccatcgcagcttaaatcaaaaaaaatgtgggaagatgtgcagtccaagaagctcaatattgagagcaaggatgttcatgctttagctgttgcttggattgataccttactcactgaatttgcttttgatgaatctattgattcgacactacgaatcaaagcagctggattctacaaacccacttggggtagtcaaggacggtttggaaaagctcttaggaaaaccctgatacagtatcctgctatgggggagctttatgtggaagttttggaggagatttttcgtactcatctgacattaggaaaagatggtgtctactttcttgctccaaatgcactacgtctgaaaatagatctcttgcatgtctggaaacaatgtaatgactgcacggcactaatgccatttgctttagaacattctacttgccttgcttgtggtagtaacagtgtcaaaacagtcgagccgtcggaaagcagctatattaatgcacgaaaaggattctggcgttcgccggtagaagaagttttggtttcaaattcgcggcttctaaaccttagcgttgaagagcatactgctcaactctcacatagagatagggccagcgttcatgccactacagaactctacgaactgagattccaagatgttcttattaatgataacgacaagcccattgatgtacttagttgtacgacgacgatggaagtgggggttgatattggatctctggttgctgttgctttaagaaacgtccctccgcaacgagaaaattatcagcaacgtgctgggcgagcaggccgccgtggcgcatctgtttcaacggtggttacatattctcaaaatggccctcatgatagttattatttccttaatcctgaacgcattgttgcaggttctcctcgtacacctgaagtgaaagtaaataatcccaaaatagccagaagacacgttcattcttttttagttcagaccttttttcacgagttaatggaacaaggaatttataatcccgcagagaaaactgccatacttgagaaagcacttggtactacacgagatttttttcatggagcaaaagatactggcctaaatctcgatagctttaataattgggttaaaaaccgtattctatctactaatggtgatttgagaacaagtgttgcagcatggcttcctcctgttcttgaaactggagggctttctgccagtgactggtttgctaaggtagcagaggaatttttaaatacactccatgggctggctgaaattgttccacaaactgccgttcttgttgatgaggaaaatgaagatgatgagcagacttctggtggaatgaaatttgcacaagaagaattacttgagttcctgttttaccatggtttattaccaagttatgcatttcctacaagcctctgtagtttcttggtagaaaaaattgtaaagaatattagaggttcttttgaggtgcgaacagtacaacagcctcagcaatcaatttctcaggctctgagtgaatatgccccgggacgtttgattgttattgataggaaaacctatcgctctggtggtgttttttctaatgcattgaaaggcgaactaaaccgggcaagaaagcttttcaataatcccaaaaagtttattcattgcgataagtgctcttttgtccgcgatcctcataataatcagaatagcgaaaatacttgtccgatctgtggtggcattctaaaagtagaaataatgattcagcccgaagtctttggacctgaaaatgccaaggaacttaatgaggacgacagagagcaagaaatcacctatgtaacagcggcacaatatccacaacctgttgatcctgaagattttaagttcaataatggaggtgctcatattgtttttactcacgcaatagatcagaaactggtgacggtgaaccgagggaaaaatgagggggagtccagtggtttttcagtatgttgcgaatgtggtgcggcctccgtttatgattcctactcaccggcaaagggggcacatgaaagaccgtataaatatatagcaactaaggaaacgcctcgcttatgctctggcgagtataaacgcgtttttctcggacatgatttccgtactgatttgcttttattacgaataaccgttgggtctccgcttgtaactgatacttcaaatgctatcgttttacggatgtatgaagatgcattatatacaatagcggaagcactaaggcttgcagctagtcgccataaacaactggatcttgatcctgctgagtttggctctggtttcagaattttacccactatagaggaagatactcaggcattggatctcttcctttatgatactttatccggcggtgcgggttatgcggaagtagcagcagcgaatctagatgacattcttactgcaacactcgcattgttagaaagctgtgagtgcgatacctcctgtacagattgtctcaatcatttccacaaccagcatatacaaagccgtctcgataggaaactaggtgcatctttacttcgttatgcactatacggaatggttcctcgttgtgcttcacctgatattcaggtagaaaaattgtctcaattgagggcaagtctggaattggatggttttcaatgcataattaagggaactcaggaggcacctatgattgtgagtttgaatgaccgttctattgcagtgggaagttatcctggtcttattgatcgacccgactttcaacacgacgtatataagtcaaagcatactaatgctcatatagcctttaatgaatatcttcttcgttcaaatctgccacaatcgcatcaaaatattagaaaaatgttgcgctgatagcagcagtattgagtgccctaaagccctgtagggcactcaaggttttcagtgcgtgagcgggctttaactgaagccataaatgtacgtatgggagaaaatgtgaccatttaactcgccagcaactattgcacaatgtaaaattatgcccattgag

SEQ ID NO: 5 - DNA, 6946 bp, Escherichia coli
acggtaatgctgagtttctccattaccattgcaaatgactcaccagagcagactgaacagcgcagaagtgggattgtggatacgtgaagtgagagtaaggggaaaatccacaataatcatctatcgaacagggaggcgaactttacacgatggttttccgggagtgcttacccggggttcctcacctctggctaatctctggattgagtcgcgatactccaacaaaagcaacaagctaacgcagcaagaagttaacgctcatcgagagtaaaatgcacacttttatggcttactcgttacaataacagccagtttgttcagaaaaccggattcagtatggccagaataccaaccaaaaaagctaaagcaaaaaaagggtttgaagaaacattatgggatgccgcaaatcagcttcgcggcagcgttgagtcctccgaatacaagcacgtggtgttgagcctcgtgttcctgaaattcatcagcgataagtttgaaacacgccgcaaaaaaatgattgccgatgggcaggcagatttccttgagatggaagtgttctaccagcaggacaacattttctacctgccggaagaggcgcgttggtcatttatcaaacaaaatgcaaaacaggacgatattgcggttcgtattgacaccgccctctcgaccattgagaaacgtaacccaaccctgaaaggtgcgctgccagacaactacttcagccgtcagaatctggaaaccaaaaaactggcatcactgattgataccatcgacaacatcgaaacgctggcacacgagactgacgttgaaacgttatcgaaagaagacctggtcggacgcgtttatgaatacttcctcggtaagtttgccgccactgaaggcaaaggcggtggtgagttctacacgccaaaatgtgtggtcacgctgttaactgaaatgctcgaacccttccagggcaaaatttatgacccgtgctgcggctcggcaggaatgttcgtgcagtcggtgaagtttgtcgagagccatcagggtaaaagccgtgatatcgcgctgtatggtcaggagctgacagccacgacgtataaactggcaaaaatgaacctcgctattcgcggtctttcagctaacctcggcgaacgcccggcaaacactttctttagcgaccagcacccggacctgaaagctgactatattctggcgaacccgccgttcaacctgaaagactggcgtaacgaagcagaattaaccaaagatccacgttttgccggttatcgtatgccgccaaccggtaacgccaactacggctggattttgcatatgctctccaagctgtcggctaacggcacagcgggttttgtgctggcaaacggttcgatgagttctaacaccagcggtgaaggcgagatccgtgcacagatgatcgaaaatgatctgatcgactgcatgattgctctgccaggtcagttgttttacaccacgcagatcccggtgtgtttatggtttatgaccaaatcgaaggctgccgatccggccaaaggttatcgtgatcgtcagggcgagacgctgtttattgatgcgcgtaacctcggcaccatgattagccgcacaactaaagagttaacagcggaagatattgccacaatcgccgatacttaccatgcttggcgtagcacgccagaagaactggctgcacggattgcgcgtggtgacagcaagctggaaaaatatgaagaccaggcaggcttctgcaaagttgcgaccctgcaagatattaaagataacgactacgttctgacaccgggccgctatgtgggtgcagccgagcaggaagaagacggcgtggcatttgagaccaaaatgcgtgaattgtcgaagacgttgtttgagcagatgaagcaggcggaagaactggatcgtgcgattcgccagaatctggaggcgctgggttatggggagtaaatgggagaaaataaaacttaaagaagttgtagatattatcactactaaagttgatgtatcgcaaattagtctttgcgattacatatcaactgaaaatatgcttaccaattttggaggtatatcaatagcaaatagtaaacctagcacagggaaaataacaaaatttcattctggagatattttattctcgaatatcagaacatattttaaaaaactatggcttgcagatcgaactggtggctgttctaacgatgtaattgtattccgtcccaaaaaacatattaattctaattatattttatcagtattaatggatcaaaaattcatcgaatatactgttttaacatccaaaggcaccaaaatgccaaggggtgataaaacagctatattagattatgaatttaatcttgcaccagataaatattgccaacatatcgcaaaaacaaacactcttatatttagtaagttaaaatccaatgaagtaataaataagtcattagaacaaatgtcccaaactctcttcaaatcctggtttgtggattttgatccggtgatttataacgctctggatgcaggaaatccaatcccggaagctctgcaatctcgtgccgaattacgtcaaaaagtacgtaatagtacagattttaaaccgcttccggcggaaatccgttcgcttttcccaagtgaatttgaagaaacggagttgggttgggtgccgaaaggatggagtattgttcgaactgaagatattgcattgaaaataggaatgggaccatttggttccaatattaaagtatccacatttgttaatgctggtgtaccaattataagcggccaacatctgaaagccctccttcttatcgatggggataataatttcattactccagagcatgctgaaaagctcaaaaactctgctgtatatagaaaagacataatttttacacatgcaggtaatattggccaagtttctttaattcctgaagattctgaatatgacagatatataatttcccaacgtcaatttttcttacgcgtaaatgaatcaaaatcatcgccgtactatttgattcattattttaggtcagaaaaaggacaacatgctctgctttctaacgcctctcaggttggtgttccttcaattgctcagccttcaacacatttgaaaaatatatcattcctaaatcccccaatggttttgcttaaagagtttgaaaaatttagcacccctttattccatcgctttagtaaaaatagaaaatgtggagtctcactaacagccctccgcaacaccctgctcccgaaacttatctccggtgagctatccctggaagatcttccggatctcagcaccgatacagaagccgcataacgcattttgcccctgtaaaatcaggggctttctggtaaggttttctactgatacaggaatgcttaccagaaattagccagggttggagcgcgatatgagtctctctttcagtgaagcaaaattagaacaagcgatcattgaactgttacaggatcaggggtatcaacatctgatcggcgataatgtcccacgttcgagtctcgatcaggtcattatcgaagacgatctccgtcattatttagcggcacgctaccagcctgatggcattactgaagaagagattcagcgactgatcaaacagttcaccacgcttccggcttccgatctttatgaaagcaacaaaacattttgtcgctggctggcaaatggttttctgttcaaacgcgacgatcggcaacaaaaagatctctacattgaattgctcgacacccggcatctacctgccgcactgcgccagatatttgacgccgaagatgtcctgttgcaacaggctgcggaactcccgccctcctatattaatccgccgcttaacctgattaagattgttaatcagcttaaaatctccggcaaagataatcagagtcgtattcctgacggcattctctatatcaacggtctgccactggtcgtctttgaatttaaaagtgcggtgcgcgagcaggatgctagtattggcaatgcctggagacaactctgcaaacgctatcgccgggatattccgcaactgtttatctacaacgcgctctgcattattagcgatggagttaataaccggatgggcaacctgtttgcgccctatgaatatttttactcatggcgaaaagtcaccggtaatgaaaaccgtgaacaggatggaattccatcattgcactcaatgattcaggggctgtttcatccggtacgtctgctggatgtaattaaaaactttatctgcttcccggataaagccaggcacgaagtaaaaatttgctgccgatatccgcagtactatgccgcccgcaaactctattacagcatcaagcaagcgcgtaaacctttcggtaacggtaaaggcggcacttactttggcgcaacgggctgtggcaaaagttacaccatgcaatttttaacgcgtcttttgatgaagagcgtagagtttgccagcccgaccattgttttgatcaccgaccgcaccgatctggacgatcagctttctgcgcaaatgtgcaacgccaaaaattacattggtgacgacaccatccttcccgttaccagccgtgaagatttgcgtaatcaactggcgggacgcaatagtggcggtgtcttcctgacaacgatccataaattcaccgaagacaccgaactcctttctgaacgcagcaatatcatttgcatctcggacgaagcacatcgcagccaggttaacctcgaccagaaagtcatcatcgataaagaaagcggaaaagtgcgcaaaacttatggctttgcgaaatacctgcacgattcactgccaaacgccacctatgttggctttaccggcacaccgattgacgcgacgctcgatgtcttcggtgaggtgatcgacagctacaccatgaccgaagccgttcaggatgaaatcactgtacgcatcgtgtacgaaggccgtgcggctaaagtgatcctggactccagcaaactggaggaagtcgaaaagtattacgaagagtgcgcaaacgcaggcaccaatgagtggcaaatcgacgaaagcaaaaaagccaccgcaaccatgaatgcggttctgggtgatgaagatcgattaaaagccctcgcggaagattttgccaaacattatgaaaaacgcgtagccgaaggttccaccgtaaaaggcaaagccatgtttgtttgtgccagccgtgaaattgcctgggatttctaccgccagcttaaagctattcgccctgcctggtttgaagtgaagcaagcccccgatggcgtcttcctgacagaacaggagcaaaaagagttaccgccttctgaaatggtgaagatggtcatgacgcgcggtaaagatgacgacgaggcgctttatgatttactgggcacaaaagaatatcgcaaagagctggataagcagttcaaaaacgctaaatcgaatttcaaaattgccattgttgttgatatgtggctgaccggttttgatgttcctgaactggatactatctatattgataagcccttacaaaaacataaccttatccagactatttctcgcgttaaccgtaaactggaaggcaaaagcaaagggttagtggtggactacatcggcattaaaagtcagatgaaccaggcactggcaatgtattcccgcattgatgccaccaactttgaagatattcagcaatcggtgactgaagttaaaaaccatctcgatttgttggggcaagtcttttacgactttgacagtcgggattattttagtggtgagccacaagcgcaattatcctgcctcaaccgcgcggcggaattcgttctgcgtacccagaaagttgaacgtcgttttatgggactggttaaacgcatgaaagccgcctacgacgtctgctgcggcagtgaagcactatcacagacagaacgtgatcatattcactattatcttgctgttcgttcaattgttttcaaactgacgaaaggtgacgcaccggatgttacccagatgaatgcacgcgttcgtgaaatgattgcagaagcgctaaaagctgatggcgtagaagaaatttattttcttggcgataaaaaagcggaatccatcgatatttttgacgaagattatctggcgcgaattaacaagatcaaacttccggcaacgaagatccagctattacaaaaattactggaaaaagcgatcagcgacttcaggaaagtgaaccagttgcaagggattaacttcacccgccgcttccaggctattatagatcgttataatgagcggcgagaagatgatgtactcaacggtgaagaattcgatacattcagtcaggaaatgaccgatattatctatgatattaaaacagaaatgggcacctgggccgatttaggtattgatattgaagaaaaagcgttcttcgacattcttgctcatatgcgcgataaatatcagttcacctatgacgatgaaaaaatgctgtcgctggcaaaagagatgaaaagcgtggttgacaacacatcgaaatatcctgactggagtaaacgcgatgatattaaagcgaaactgaaagttgaacttattctgcttctacacaagcataagttcccgccagtagcgaatgatgatgtttatatgggggtactggcgcaagcagagaactttaagaaaaatcacatgagttgagtctgtcataatggagtatctcatcagatactccttctttatctattttgtaagagccaaaatagataaattatgttacgcataaccagctcatttaaactatctggtctgtttcctccggttctacaaaaatagataggggtgcacctacgttaccaatactggcatcatggctacatacggtggtcagtttacgcttactcaccattctttacttttttataagcgtcaataggtttgtaagcgactcgtcagaaccgtattgatat

SEQ ID NO: 6 - DNA, 3917 bp, Escherichia coli
acctgccttcctttgatacaattcgtaacaggttactatcatcataaaaaagctcaacccgatgaactcgctaaaaatgagacaaatcatttatatctcgaaaaaacttgttacaatcatgagcgctacaccgaacttaaccatataaattatgtgtgttttgtttattttttaaacgattacaactatccattatttacacaggtatcaaaatgttagcgcagctttttgagcagttgtttcaatcgatagactctacactgatcaccaatattttcatctgggctgttatattcgtatttttatcagcgtggtggtgtgacaaaaaaaatatacatagtaagtttagagaatatgctccaaccttaatgggggcattaggtattctgggtactttcattggtattattattggtttactcaattttaataccgaaagtattgataccagcatccccgtattattaggtggcctaaaaacagcattcattacaagcattgtaggtatgttttttgccattttatttaatggaatggatgctttcttttttgccaataaacgaagtgcgttagctgaaaataaccctgaatctgttacacctgaacatatctatcatgaattaaaagagcagaaccagactctgactaaattagtctcgggtattaacggtgatagtgaaggttctcttattgctcaaataaaattactacgtactgagattagcgattcctcgcaggcacaattagctaatcacactcatttcagtaataagctttgggaacaacttgaacaatttgcagatctaatggcaaaaggtgctacagaacaaattattgatgctttgcgacaagtcattattgattttaatgaaaatttaactgaacagtttggtgaaaactttaaagctcttgatgcctctgtaaaaaaacttgttgagtggcagggaaattataaaacgcaaattgagcagatgtcagaacaatatcaacaaagtgtcgagtccctggttgaaacaaaaactgcggttgcagggatttgggaagaatgtaaagaaattcctctggctatgtctgaactgcgtgaagtgcttcaggtgaaccaacatcaaatcagcgaactctcccgccatttagaaacctttgtcgccatccgcgataaagctacaaccgtattacctgaaatacagaacaaaatggctgaagtgggtgaactgctgaaatccggagctgcaaatgttagtgcatctcttgagcaaaccagccagcaaatacttcttaatgcagattcaatgcgcgttgccctggatgaaggtaccgaaggattcagacaatcggttacccaaacacaacaagcatttgcctcgatggcgcatgatgtcagcaattcctccgaaaccctaaccagcacgttaggtgaaacaattactgaaatgaaacaaagtggtgaagaattcctgaaatcactagagtcgcactcgaaagaattgcatagaaatatggaacaaaatacgacgaatgtgattgatatgttcagtaagactggtgaaaagattaaccatcaactatccagtaatgccgataatatgtttgattcaatccagacatcatttgataaggctggtgcagggctgacttctcaagtcagagaatcaattgaaaaatttgctctatccatcaacgagcagttacatgcttttgagcaagcaactgaacgtgaaatgaaccgtgaaatgcaatcattaggtaatgctctgctttcaatcagcaaaggttttgtcggtaactatgaaaaacttattaaagattaccaaatagttatggggcagttacaagcattaatttctgctaataaacatcgagggtaatcgatcatggataagattatagggaaacaattacctaaaaaagatcaagataatgaacattgggtatccatgtcagacctaatggcagggctgatgatggtttttatgttcatatctattgcttatatgcactacgtacgtattgaaaaagaaaaaattaaagaagttgccgtagcctacgagaatgctcagttacagatttataatgctctggatattgagtttgcaaaggatttacaagactgggatgcagagatcgataaacagactctggaggttcgatttaaatcaccggatgttttatttggcttaggaagcacagagctaaaaccaaagtttaaactcattcttgacgacttctttcctcgctacctaaaagttctagataattatcaggaacatattactgaagtccgcattgaaggtcacacaagtactgactggacaggaacaacgaatcctgatattgcttattttaataatatggcactatcgcaaggtcgtacacgtgcagtattacaatacgtttatgacataaaaaatatcgcgacacaccaacaatgggttaaaagtaaatttgccgcagtaggttattcatctgcacatcccattcttgataaaaccggcaaagaggaccctaatcgctctcgtcgtgtcaccttcaaagttgtaacaaatgccgagttgcagattagaaagattattcaggagtaagagatgaaattatctatcgacatttcagaacttattcaattagggaagaaaatgttaccagaaggagtcgatttttttctggatgaatcccctattgactttgatcctatagatattgagttatccacgggtaaagaagttagtatcgaagatcttgaccctggtagcgggcttatctcttatcatggccgccaggttcttttatatattcgggaccattcagggcgttatgatgcggctatcgtagatggcgaaaaaggaaaacgttttcatattgcctggtgcagaactcttgatgaaatgcgccataaaaatcgatttgaaaggtatcatgcaactaaccgcatagatggtttattcgaaattgatgatggttcaggtcggagccaggatgttgatttacgggtatgtatgaattgcctcgaacgacttaattataaaggaagtattgataaacaacgaaaaagagagatttttaaatcattctcattaaatgagtttttttcagattatagtacctgttttcgtcatatgcctaagggtatctatgacaaaacaaatagtgggtatgtcgaaaactggaaggaaatatctaaagaaatacgagaaaaggcaaattatgtttgtaatgattgtggcgtgaatttatcaaccgccaaaaacttgtgccatgtccatcataaaaatggcatcaaatatgataatcaccatgaaaaccttcttgttctgtgcaaggattgccatcgaaaacagcccctccacgaaggtatattcgttacccaagcagagatggctatcattcaacgtttacgttcccaacaagggttattaaaagcagaatcctggaatgaaatatatgacctgactgatccatcagtgcatggtgatattaatatgatgcaacataaaggctttcaacctcctgttcctgggttagatcttcaaaactcagaacatgaaattattgcaaccgtagaagctgcatggccaggccttaaaattgcagttaaccttactcccgccgaagtcgaaggatggagaatatataccgtgggtgagctggttaaagaaatacaaaccggagcctttacgccagcaaaattgtaaattctaaaactccgtgaaagttaaggctttcacggaagataaataaagtttccctgatttgtgactcaaattacaaaagtagtttatggcataacttgtctgatttttatggtgtaacaggtataaaagcatatgctatggttcgcctcatacttaaaacttccctcatatgggtgaaggttaaagcttggtagacagaagacagtcacaatgaataaagcaataaattga

SEQ ID NO: 7 - DNA, 1921 bp, Escherichia coli
acatcccgtcatcatgccatcacgacgcgctgagacgctgaaaaaataaaatcagcaccaccgtcagcgcgcagtgctttccccgcctcgcccgcccgcttcatgagacggttttaatgcagttgcattatgtcccgctcctcagtgctgcgctccatcctgattacaaaaaccgttatcaaaaacacatgcaaatagacgcagtcaaatgcgctaccgcctctcgcaataccttcaatttcatgataaaaaacatcatccctaacaagagcattatcctcatgaaaaaagtatatgaactaaccagtgaagaagcactgtcatattttcttcgccatgactcctacacaacattagaattaccggcttatattaatttcaccacattattaaatgatattaattcatctatccataacaaaaaaattaaaattgaaccaaccgccaaggagctgatgggtaaagatatcaattatgaggtgcttgtcagtaaagatggtctatatagctggcgtaggataacacttatcaatcccctttattatgtctacttctgtagaaaaatcacagcaccagcaacctgggaaatcataacagaaaaattcaaatcttttgaatcaaacgacctttttacatgttcaagcatccccgtcagaaaagacaactcgtcaaacattgctgcgtctgtaatgaattggtgggaagattttgaacaaaaaagccttgcccttgctcttgaatacgaattcatgttcagcactgacatctcaaacttctacccatcaatatatactcatagttttgaatgggtattcatatcaaaagaagaggcaaagaagaaaaaaagcaaaaataacccagggggattaattgacagccacattcaaatgatgatgaacaaccagacaaatggtattccactcggcagcacattgatggatacatttgctgagcttatcttgggtcaaatcgatatagaattaagaaaaaaaactaacgaactcaaaataataaactacaaggtagtacgctaccgtgatgattaccggatcttctctaatagcaaagatgatttagacataatatcaaaatgtttagtcaatgtattgggcgattttggtttagatctaaactcaaaaaaaactgaactatatgaagacatcatacttcattcgttgaaacaagctaaaaaagactacatcaaagaaaaaagacataagtcactccagaaaatgctctattcaatatatttattttcacttaaacatccaaactcgaaaacaaccgttagatatctaaatgattttcttaggaatttatttaagcgaaagacaattaaagataacggccaacaggttgatgctatgcttggtattatttcaagcatcatggcaaaaaaccctacaacgtacccagtaggaacggcaattttctcaaaactcctcagttttctttatggtgatgacacccaaaaaaaattaacaaagctagaacaactccataaaaaactggataaacaacccaatacagaaatgcttgacatatggtttcagcgaactcaagcaaaaataaacctagagtggaataaatcttataagtcagctctatgcgtccgtataaatgatgaactcacaaaagagaaaacattttctgtaaataatttatggaatattgactggatccaaggaaaagaaacaagccccaataaagccaaaatattatccttgctaagaaaaacaaaaatcgttgacacagataaatttgataaaatggatgacaatataacacctgaagaagttaatctattctttaaagagcacagcaattaatatcccaaagccatgttagtaacataacatggcttttttaaatcactcattatcagttatcaagaacgaacataacattctattccgaggag

SEQ ID NO: 8 - DNA, 2102 bp, Lactococcus lactis
agttttttaaaggggttattttctaattatagtcccttaatttccattttcgtgtctaattatttgacattagtccatacaatagtgactctaagatttaaggataacatcaactttcaacataagcacaataactatttttttattataattgaaaagagaattgaattattacctataaaacttaaaggagtataattatgaaaaaagagtttactgaattatatgattttatatttgatcctatttttcttgtaagatacggctattatgatagatctattaaaaacaaaaaaatgaatactgcaaaagttgaattagacaatgaatatggaaaatcagattctttttattttaaagtatttaatatggaatcctttgcagattatttaaggagtcatgatttaaaaacacattttaacggtaaaaaacctctatcaacagacccagtatattttaatattccaaaaaatatagaagctagaagacaatataagatgcccaatttatacagttatatggcattaaattattatatatgtgacaataaaaaagagtttatagaagtatttattgataacaaattttcaacgtcaaaattttttaatcaattgaattttgattatcctaagacacaagaaattacacaaacattattatatggaggaataaagaaattacatttagatttatctaatttttatcatactttatatacacatagtataccatggatgattgatggaaaatctgcatctaaacaaaatagaaaaaaagggttttctaatacattagatactttgattacagcttgtcaatacgacgaaacacatggcattccaactggaaatctattgtctaggattattaccgaactatatatgtgccattttgataaacaaatggaatataagaagtttgtgtattcaagatatgtagatgattttatatttccgtttacttttgagaatgaaaagcaagaatttttaaatgaatttaatctaatctgtcgagaaaataacttaattattaatgataataaaacgaaagttgacaatttcccgtttgttgataaatcgagtaaatcggatattttttctttttttgaaaatattacttcaactaattccaacgacaagtggattaaagaaataagcaattttatagattattgtgtgaatgaagaacatttagggaataagggagctataaaatgtattttcccagttataacaaatacattgaaacaaaaaaaagtagatactaaaaatatagacaatatcttttcgaaaagaaacatggttaccaattttaatgttttcgaaaaaatattagatttatcattaaaagattcaagattaactaataagtttttgactttctttgaaaatattaatgaatttggattttcaagtttatcagcttcaaatattgtaaaaaaatattttagtaataattcaaagggcttaaaagaaaaaatagaccactatcgtaaaaataattttaatcaagaattatatcaaatattgttgtatatggttgtctttgaaatagatgatttattaaatcaagaagaattactaaacttaattgatttaaatattgatgattattctttaattttagggacgattttatacctaaagaatagttcatataaattggaaaaattattaaaaaaaatagatcaattatttattaatactcatgccaactacgacgttaaaacttctcgtatggcagaaaaattatggctatttcgttatttcttttattttttaaattgtaagaatatttttagtcaaaaagagataaatagttattgtcaatctcaaaactataattcaggacagaacggatatcaaacagaacttaattggaattatattaaaggtcaagggaaggatcttagagcgaataacttttttaatgaattgatagtaaaagaagtttggttaatttcttgtggtgagaacgaagatttcaaatatttaaattgataagtatttgaaatctattattagttcctgaaaaaatagctgtgtcttgtcaatataaatgacaagacacagctattttttttaattttgaaatttataatt

SEQ ID NO: 9 - DNA, 2029 bp, Sphingobium yanoikuyae
gcccatcattgcattaagtgatgggcggagcctttggcctctaatctggaactagctgcgattttcagactcgaatgctaaaaggtcgtttcgcacctgaaatcaagctgctagagttctcttacggggttctcccctcgcatacgcgctgtagtaactgcggcgtaagagtaaatgtctgcacatatcatgcccgccatgatcattcggtaattcctggcgtgactggaagggagaccccgtgccacctatgggccatatttttggaccagtgagtttcgtgaagttgccgccggagttgatgagtgaggccagtcttcttgctcatcttggcgttggccgtgccgaacttaatgtcattagttggtacgccggtaggatgtaccataaattcgacattaaaaagaagtctggcaaggcgagggtgattaatgcgccggatcgtcggctgaagatgttgcagaggaagatcgccgatttgctgacgcctctctatcggaggcgcaaccctgttcacgggttcgtgatcggtcgttctgtgaagaccaatgctcagtcccatctgggcagcaagttcatcgtcaacttggatttgaaggatttcttcccgtccatttcgtacggacgcgtgacgggcgtgctgcgttcgcttggcatgaagcgcgaggtcgcggaagctattgcgacaatttgctgcctcaatgggacgttgccccaaggcgctccgagcagtccgatcttgtccaatatggtttgcttccgcttggatcggaggctgcgggagttagccaaggacgcccgttgcatttacacccgctatgcggacgacctgagcttttccagctaccagccgctaatgggattgttcgaaacgacaccaccggcttcagggcatttctcaccggatctgttgtcggaaaaacttaagcagattttcagcggtaacgggtttgtgctgaacccggacaaggctcactatgctgacaagcattcgcgccgcaccgtgacaggcatccggattaacgaggctctcaatgtcgaccggcggtttgtgaggaatttgcgggcagccctttactctgttgaaactttgggactggccgccgcccaggcaaaattcaaatccttgcatggtggtaaagctgacgtcggccagcacctgcaaggcaaggtatcgtggttggggtacatcaaaggcgcatctgacccagtctttcggagtgtcgcatcccgtttcaacgctgcattcccgccgctcgcgctcgatattttgcccagtccccaagaaatacgagaacgatcagtgtggctgattgagcactgggaaacagggggtgaccaaggcacggcgtttttcatgaagggtgtcggtctggtaacggcagagcattgcatatcgccgtccggtatagttgagttgtatcacccgacgaagccgtcgaataaattcgcggcgtccgtgaagcatcgatgcccagatcgcgatctggccgttctcgaccatgcaatccccaacaacgaattctatgagctcgaaaccgccggcaaggcagccgcgacaggcgatgccacgaccgcgatcgggtatcccggttatggacccggcgacagactgaacatccgacctggcgcagttacgtccctgccaactaagagtgcggtgaagatggtcgaggtccagcagatgctgacgccgggcatgtcaggagggccattgctggatgtggatgaccgcgtcgttggcgtcgttcacaagggcggccatgatcatggtcggcaactcgctattgccatatctgaactgcatgcttggctgccctgacctgattagccgaaccggctaatcgcgcaggcgccgaaccagccgtttccagcttgcttcactgttcatccagtcaggccggtccggttgtcgaggcgttggagcaaatcgttcaggatgtccccgacagcgcgtgcagcgcaggtgcgatccgacggtttccatagcggtgttccagcaatgcgcgaggaaccagcggttgagttt

SEQ ID NO: 10 - DNA, 2009 bp, Proteus mirabilis
tctatctaaaagtatacatatagtatttcaatgaaggttatattatattttgtggctgttttctaattttatcaataagattattgcaaaaggctgataaatataatagctttattatatcggaggagttgatttaactttcctatactatctgtataggctaataccaatggcaattttgccctcaaattggtctccttaatgtttatcaacgtgttatacggtagtgataaaacctcctccgatatttttctcatgaattgggatattttaaatatgttttgctcagtaaccaagttgcatgaatgtaaaaatgttgaacaattatactattttttaggatgtgaagaggctgaaattagtaggtttttatatagtggagtaattaaataccgctctttttccatacttaaaaaaaatggtaattttagaaatataagagcacctgtaaagtatttaaaagaaattcagtataagataaaggatgagctcgaaaaatattataccccgaaatcatgtactcatggttttatagctggaaggaatataatcacaaatgcgaaacctcatataagaaaagaatttattttaaatatagatttaaaggatttttttgattcaattaattttggacgagttagtcgtttatttcaaagccaacctctaaacttgccagagaatgttgcccatgttttggcacatatttgttgctataatagagccttacctcaaggtgctcccacatccccaattatatctaatatgatatcttatcgtttagacagacaattgaaggagttggcaagaaataatgcgtgtacttataccagatatgcagatgatataactttttcttttactaaaactaaaaagtatcttccaaaatcaattgtttctttaagtaaagataataacattatactaggccatgaattaaaaaaggtaattgaagataattggtttgaaataaatgaaggaaaagtaaggttacaacataaaacacaaagacaatcagtaacaaatattacggttaacactaaaattaatataagtagaaaatttaaaaaacaaacttcagctatggttaatgcattatttaaatatggagcatctaaagctgaaagagaatattttagtaagtatcacaagggttatatagcagaaaggcaatataataagattaaagaaaaaccaggtttattatttacacaaaaagtaagaggaaggttgaattatatccgattagtttgtggtaagaataatgaaagctggagaaagctcatgtataaatatactgtggcaataggacaacctaatgaggagtacaatagaacattgtgggatattgctggtgattcaacgttcattctttggtcgaattcctcacaaggaagtggtttttttcttgaaaatattggtttagttacaaatgagcatgtaatcgaaggaatagaaaacagcaatattaataatgatctaataatactttggttaccaaatgaaagaaaagaatatattgagttacacttagcttggaaagatgataatactgatttagctgtaattacttctaatatatcttttcttgacataaagcctttacaagtagagccagttcctatttatgatataggaacagaagtatatgcagttgggtatcctaattatgacgccagaggctcaattggaaaacctactattattacagcaaaaataacgagtataattactcgagaaaggcaagaaagaatcgttatagaccaaccaatagtacatgggcatagtggtggggtcgttttaaatgctgatggacgtgtaataggcattgttgcaaatggaaatgccgagggggaattaagagtagttcctaatgcttttattcctattgaaatattattaaatgagcacaagttacgaactaaatcataaaattattattcttaaaataattaaatattttttaaaaccactagtttgataactagcggttttttatttttggagtacat

SEQ ID NO: 11 - DNA, 2657 bp, Photobacterium damselae
ttataacaagcatttatagtttaaagatactttttctaatcaagtagaacctttgggtggcatcggcctatctcgcttttgtccaaatgtgggctgatggggcatgaaaaatggaaatgccccattcctacttagtgctattactcattcatacctcgttaacgtgattttggattagttttattcactgtatatatcaacagttataatgaagcgcggtgattttatcgctttagttctgtttttaataagaaatatttcttgttaaaaacagaagtgaaatcataactaattgaaaattatatcgtttaacatttcagtttgtatttaataagactgattaaatacatttcttacttttcacaccctctttcaaatcggtgagtataagaaagtgccagtaagctcataatatttaacgattatatcgagtataatatctatcttttataagtatatttttgcgtaaaagtaagaatgcttattaatatactgttagttgcatcaagtgatgcattgcattctgtttagtattgttatagattctgccgcaagaggcgagagtttaactttctgctgttaatctgcggcggtcataagcatgtttctttttaccggttttcagctagtctgatgatgccgttacgctgtacaagagaaaacaaaatcgcctcgttctttaagggtttgttactttggtagacatttcattaatttcccaaattgcagctaaagctgcattctcatccaatattcaagtacctctacctaataaattgaaagattgctcatgcgttgaagggctgactcaatatctgggttttacgaattatgatgagctgaaaaaactgatatacccctcagttgaccacctatataaaggctttagcattcctaaaaaaaatggcgagtttcgaacgattgatgcgccaaaaaaggagctaaaaacaatacaaagtttcctttcgaaggaattggttcaagtttactctcctcgtaatgctactcatggttttgtaaaagatcgaagtatagttacaaatgcgtcgaagcatgtagacaaaaaatacgtactcaatttagatcttgaggacttcttcggctcaattcattttggtcgcgttcgaaacctgtttcaatcgcatcctttgaacttacaccattcggtggcgacggttttatctcacctatgctgccacaatggcaagttacctcaaggcgctccaacatccccgatcatctcaaatatgatcgcttatcgtttagacaagcaactgcagacattggcttctaaaaatagatgcacatatacacgctatgctgacgatataacattctctttcacacaaactcgtgggcgcttgcccaaatctattgttacgttaactcgcgatctacaactctctttgggtaatgagctaaaggagcttattactgagaatggttttgttatcaattctgataaaactagaatagctgcgcgaagtaataggcaagaggtcactggtgtgatcgtcaatgagcgtatgaatgtgtctcgaaagtacattaaacaaacacgttccatgctatatgcatggaaaaagtttggtctcgaagatgctgaagaaacctacttgagaaagtttcatggaaaaacagtgtttgagaagcaccagcggcgaattgacgaaaagaaagggcagttttttaagaaagttgtaaaaggcagaattaactttattaaaatggttcgtggtgctgaagatttaatatacagaaaaatagcttacgaattctctgtattaattagcaagcctaaaccagagcttgtgcaaaccccattggataaagcgtgtgattcaatatttatcgttgaaaatatggtggagaagagccaagggacagcgtttttgctgaagggaattggtatcgttacaaatgaacatgttgtgcgtggaatcgatgaggaactgtcagatcttttggagctatttaggtatcatgagcaggaaactaagcgtccagttaaatttcaaaagtcatgcagatctagggatttggctattctaaaaccaactacaagctacaacggtattaagcgcttggatgttggtgatgatagtcagatcggtattggttcggttgtaaccgtcttaggttttccccagtattcgcctggtgaaacgccttatatcaatacaggcaaaattatccaatctaaagtattgtttggtgaacgcgtctggttgctagatatacctgtaatccatggaaatagtggtggccctgttcttaatgaccgtcaagaagttatcggcgtagctgcaataggttcgccaacacatgaccactcaacgaaactccatggcttcataccaatttccacgttattagcgtatgtggaagaatgcaactaacaaataaggatatgtgtcgcgaagccgacacctatccgaagtgttggacaagcccaagccaccttatataagtaaataccatcaagagtaatgtcaaatccttacttttcctaatctctaaaagcctaaatagaacgaacggtctaagaagcttttgtccaacaacgagctagcttatgtgatagctagtttgtgatcaaactttagatttttacactctacaaatagcttgaaaagtcacatttccgatcagactta

SEQ ID NO: 12 - DNA, 2203 bp, Bacillus subtilis
cgttaataattatgttgttagcttaccacatttcattatcataaatacttacagtaggtaagataatgtaaaacatcgcgattaaatataaacttttcaaaaatgctgttaatattgatgaatatatatagtataatttacactgacagcaagggtaagaaaaaattgactttatggcggtgaaatcgccgtctgttatttaaagggtatacttaatttacacgcttattttatcttcgaagttttattcgatttgtctaatcgctattaggagaagggtagaattttaacccttgctgttgtaaataggaggggattgctatggtttataagttaaattttgaattacagagcaatctagaggatattaaacaaaatttcaagaatttatcttgttttgaagatgtagctctccttttagaggtaccaaaagaattattgtggaaagtacttataaaaaataaaggagctaattataaggcgtttaaattaaaaaagaaaaatggttcagaacgtgttattttttcgcctactttaagtttatctattctgcaaaaaaagctagcttatattttggagtctaactataaaaaccataggcaatcatatggttttgtaaaaggaagaggaatagttgataatgctcaaaagcatttaaataaaaaatatgtactaaattttgatatagagaattttttcgaaagtataacctttagaagagttagatcaatgtttatgacatattataaatttaatgaaaaagttgctacaaccttagcaaatatatgttgtcatccgaatggttttctgccacagggagcagcaacatcccctatcatatcaaatattatatgtaatagaatagataaagagttttctaaattggccaaaaacaacagatgtcaatatactaggtatgctgacgatataacgttttctacaagcaggagggttttccctcatgatattgcatatataaaagaggggtctatttttctgaatagtaatgtaattagtattgtggaatatcaggggtttaagattaataaagaaaagacaagacttcagaattatagacaaaatcaaactgtaacgggaattacggtaaatgaaaaattaaatgttaaaagaagctatgtaagaagaataaggtcaattcttcactgtattgaaaaaaacgttgaagatttacagaaagcagaacaaattttcgaagaaaaatacccatttcgtcaaaagaaatatcttgataatattaatatgtttgctattttaaaaggtatgatttcacatgttgggcatgtaaaaggaaaagatgaccctttatatttgaaattagcaaagagatttaataaaatatcttatcttagtgaaactatatctccttttaaattagaatctttaaagaaatttcatgaaacttatacatatataattgattatgatgataaagttcctttagtttgttttgaaaacgataaaatggaggaaatattatacggtcaaggaacgggctttttattaaagggagttggcttaatcactaatgctcacgttatagaagatgcaatagaagctattaaggacaataaaaaatttaacaatgagtatggtatctcattttttagaggtaattatcctgatttaaaatataaagcgaaagtatccaaatatgacctagataaagatattgcaattttagatataaaaggttttaatatagacaatcaaggatatgaatataacattgacatgaaagatgggcagaaaattgaattaatagggtatccagactacaaaatagggcaagaaataaaaatcgaaactggccacctaaaaggtattagaaaacatagagattcaaccggaacgttccattcacgacgggaaatatcggcaatcatatacggaggaaacagtggcggacctataataaatgaaagtaatgaagtcataggagttgcagttaaaggtgctacccttcatggtgtttccccaagcgagattattccaattgaagatgtaattaatttaaactccagtaactcagaggtcagctccaagattgcaactaagcctcattaaaagatttaatattttaatgcgaaaagtcgatttttaatcaatctacttttttatttttcattttaagttgtaaatatctcttacaatttattttatttcaacgacatatttgggtatc

SEQ ID NO: 13 - DNA, 4154 bp, Escherichia coli
gtggcaagattataccccatcaggcataagatgctttgacttataacgcatcagtttgaaacacaatggtgatgggggtcacaggggctgacatgtacttttaagattaaaaagcattaacatctacttttgaagaaaacagaaaaaaacaatcacaaacctttaaaaacaaaaactatgccaattattaataaaaagtatcaagagcttcagttaacagatgagtacattaccgatccactgctcatggccctagcctggaagaaaagccatcactacatacgtaccacaaattggtatgctgacaactttgaactagacctgtcggctttggacctaatgcagcactgtaaagattgggtcaagagaatgcaggacaaaaaagaatttaaattttcagagctacaacttgttcctgtaccaaaagcctgtaaatgggagtttaagactgtcgaaaataaggttctatggcaaccttgtgatgaaaaagaacttaccctacgcccccttgcccatatacccatagctgaacaaaccatcatgacattagtcatgatgtgcctagccaatacaatagaaaccaagcaaggaaacccagacaccagctatgacatcgtccaccagaaaggtatcgtcaattacggaaatagactttattgtcagtatattgacgataaagcagagcacagcttcggtgcaacagtgacatatagtaaatacttcactgattatcggaaatttttaaataggccttatcattttgcgtcaaaagcgcaaggtgaaatttcgccggacgaagccgtttacatcatagaactagatcttgcgaagtttttcgatttagtaaacaggaagactctaattcaaaagataaaaaaccatatcagtgagtcaataaacaataaagaaaacccactcgccaatcatttatttaaatgttttgcaaactgggactggactgcatctagcataaaaaattatgacatatgcaagtcagacgaagtaacagaaataccaaaaggcatccctcaaggattggttgcagcagggtttctatcaaatatttacttacttgaattagatcaattcttgcataataaaattaacacagacataactgatgacattaaatttgttgattactgtcgatatgtcgatgacatgcgatttgtggttaaggttaaaaaatcaaaaaataataataccgcattcataaatgatgtaataaccaatcttcttaaaaatgagatagataatcttggactgataattaatcctaaaaaaacaaaagtagaaatttttagaggcaaatccgcaggcatctcgcgtagcttggaaaacatccagaccagattaagcggcccaatatcaatggatagcgccaacgaacaacttgggcatcttgagtcattattaagtctgacaaaaaccgattttgaaccaccgaaaaatggtaaatcaaatagattagctgagattgaaaaagaccgtttcgatgtcagggaggacactcttaagcgcttttctgccaataaaatcagtaagatactaaaagagttaagacatttcatctcgcaggatatagatactgatggggaggttattgccggggaatgggattatctgcaagaacgtttggcacggcgttttattgtctgttggagccatgacccgtcactggcactgctactcaagaaagggctggaacttttccctgatcctaagctattagaccctatacttgaacagctttgctcactcattgaaagcgataatgaaaaacaaagtgcagtagctacttattgccttgctgaaatatttcgacattcagcaatgactattcataaaaaagacacctatgcattccctgcacaagccaatgtggatgggtactttgaaaaaatacaacattgcgccgcgacattcattaataagcgcagcgcctctgacaacgaaacttggaacctgttaattaatcaggctagttttctgttgcttgtgcgtttagataatacattagaaaaaaatggcactgatgccaggcatgatcttatcttaaaactggcatcaggctttagaacaattacacttcccactaaaatggatagcaagactatagcctcatgtattttgttggctagtcaattagttaaagataacaaaccatttattcgctcctgcgcttctttgtgcgaaagaatttatgacaaagaacacgtcataaaattgaagaaaatagttagcataatatcacatcaaaacttatcattgtttaaatccttagtttatcattcacgacctttacaacagaagtggctaaactcagactccgtgaaaataataattaatgaatgccatatagatatacaacctttggcgacttctttaggcatgataaaaagtagtcactcattacttagaatcatatcaagacctgataacccatttgccaatgagataatggcattaaaactgatgcaagcccttttattggacaggattgtttgcctggataataaaaaagattatcaaataagtgtagcaaacaccaaagtgacgtttcataactactccaaccctccaacatcgaatgtcttcgatgcaggaatggatatggatgcaaaattattcaaatcatcgggatgggtcgattctattttcacggatgatgcagacactcaaatattgtatagagttgccatgtgcatccgttcagtactactcggcaaacaagactggacagattttggtcaagcaatttcccccaaacagggttatcggggtattaaaactagtagagacaaacgtcaattggggatgatgacaacacctgagtccattgccggtgagaactctcaggtttctggttggcttaccacactcttatccaagttgcttgcctggccgggaatttcagtgggtgataatggatatcaatggccagcaatttttacagtagatgctgtcagaaaactagttgatgctcggctgagtaaacttaagcaggattactgcaaactatcaggaactccgggacttacagaaaaaatacagttcaactggtctgactcgaaaaaagccctaacagttgctatggtccagtcaaaactgcctgcaacgaaagattttgtcagccatggacttcttttaaactccgcaaagtatagagtgattcatcgcagacatgttgctgaagtggctgatttagttgtaaaacacacgcttgcacaaaaaacaactcaacgaactcatggtgaaaaaatagagaacattgatttaatagtatggcctgagctcgctgtacatagtgacgatttggatgtactcatcgccttatctagaaaaacgaatgcaatcatatactcgggcctgacatttattgagcaacctggaatcaaaggaccaaataattgtgccgtttggattgtcccacctaaaagcaatagcagccagaaagaaatgataagacttcaaggcaagcataatatgatggaagatgagaaaggccgggttgaaccctggagaccataccaattgatgcttgaacttgttcacccccaatttactgataaaaaaggatttgttctcacaggctccatttgttatgacgcaaccgacatcgcgctaagtgcagatctcagggataaatcaaatgcttatcttgtagcagcattaaacagggatgttaatacattcgattccatggttgaagcactgcattatcatatgtaccagcatgttgtgctcgttaactcaggggaattcggaggatcttacgctaaagcaccttacaaggagccgtttaatcgtttgattgctcatgttcatggcaatgatcaggtagctataagtacgtttgaaatgaacatgtttgatttccgtcgtgataatataggaaaaagtatgcaatccgggttagataaaaaaactgctcctgcaggaatcataatgtaataaatattagatatttttatattagaggtgaggagatggcgtcacctctaatattttcgctgattgtatttagcatcaaataataaaggtacaattaatttaagtgactatcatgaaaaaattagttccgccatatcaagtaaccccggcacaaatctatcgttccgttgccagttctacagccattgaaaccggaaaac

SEQ ID NO: 14 - DNA, 5272 bp, Klebsiella pneumoniae
gcttatcccctccctactggtaacagcgttatcgaacttggaataccatcatttatacctatatctgttggtagatgtgcattgaagtgggttgaccttgagagagccagtatcgcgggcgcaggaatgacaggtaagcactaaatttcaggcacaaaaaaagctgcccttaagcgacttgattgtatcttttggtgcgaaggccggactcgcacataaaacttaacctcatgatttaaaaaagataacaaaaaacagtttaattttataccaacacagataccaacacgaaaattcattgttcttgggtatcgaacccggacaaacatgactgagttgtattagctcagatttgacctgacacagttatggcacagatctcaacctaatctgacaggcagctccgtatcagaagcggaagtgatgaccaagtttaagcatcattcttggcttgtatgagaatggcactgatctagcgatcagtaaaacttcatcgcttcatcgaaatgccctaaaactttagattaggagaaagttctatttatgccagctacaatttttcgggggagttaccttaccgctaaataaaccgaaaatcgatgctggacaatctctaactcggtggtcaattttcgttgaccactacataatggtcctcctgatgcatctgatgtatcaggaggaccgtccttaaacacgacaaaacctgtgatacttaccatggattcctctatgaaggaaaggtagtatagccattttgggtgatacatacagtgaatgtcattgctgtagttgaagtgagtaagagcgcttaagattaagttgagagaaaatgaaactacttgataaaaagtattacaacctcgagcccaaatatgagtaccttaaggactcatttattttaggactggcatggaaaaaaacagatagttttgtaagaactcacaattggtatgcagatattttagagctggacaagtgtgcgtttgatattagtgatgaagtcactaattggtcaaacgagatctcaaagaacgctctttccaaaagtgatattgaattgataccggctccaaaaggagcaagctggttcattaatcaaggtaaatggactaccaataaagataatagaaagataaggcctttggctaacatatctattagggatcagtcttttgctacagcagtaacaatgtgccttgctgatgctatagaaacaagacagaaagactgttcgttgagcaatcttggctatgctgagcatgtaaagaacaaggttgttagttacggaaataggcttgtctgcgattgggacaatgaaagggcaagatttcgttggggaggaagtgaatattataggaagttctcttccgattatcgaagctttctacaaagacctatctatataggcagggaaacagtaaataaagttagcggaattgatgatgtatatatcatcagtttagatctgaaaaattttttcggttctataaaaataaaccttctgttagaaaaaatcaaaaaaatatccgctgatcattatgcagctaaattcataaatgataatgaattttggactttggcgaatcggattttaagttgggattggcctgaagaatctttatctttacttgagagtttggatataaaagaaaaaaatgttggtcttccccagggattagcttctgctggtgctctggcgaatgcatatctcattgagtttgatgaatctttaatttctaagcttcgtactaagatagaagacagccaaataatactgcatgattattgtcgatatgtcgatgatattagattagtgatttcaggagaagcactagaaagtaataagattaaggaatctattcatgcattagttcagggcattcttgatgagacattggctcaaaatccgtcagataatgaaccatatttaaaaattaacgatagcaagacttatattcttgagctttcagacattgacaacggaagtgggcttacaaatcgaatcaatgaaattcagcatgaagtaggagcttcgagtatcccagagcgtaacggactcgataataatatcccggcacttcaacaattattactgaccgaacaggataatttttccgaggatgttgatagtttatttcccgggtttaaaaatgataagtcgataaaggtagaatctgtacgtagattttctgcccataggctggaaaaaagtttggctaaaaaaagcaagctaatttcacctgaggagaggaaacaatttgataatgaaacctcactgattgcaaaaaaattattaaaagcttggctaaaagatccatcaattatggttatcttccgcaaagcgatagctatcaatcctaatctagatgcttatagcaccattcttgaaattattttttcaagaatacaacgcaatcgtgataaacgagataaatatataatgctgtatcttctttctgatatatttcgtagcgtcattgatgtctatcgaaacctagaatcagaatacgtcgacgattatcaaaaattgatgggtgaagttacattgtttgcccaaaaaatactttcctgcaaatcttttattccaaattacgcatatcagcaagcattattttatctcgcagtgatcaataaaccatttatagctagtaataaagcttcttttgatcttgcaaggcttcaatgcgtcttaattaaacagcatttagaaccgttgaatagtagtgatggatacctatttgaggtatctgctcaaatcagtaaagactaccgagcaaatgccgcttttctactttctcatacaaatagtaacaaagtagtagacttaattatcgaaaaatttgctttccgaggaggtgaattctggaatgcaatttggaaagaaattgttaggatgcaagataaagataggattaacgaatttagatgggccatatcaaaatatgagtcaaagccaaatagttcggagcactatctttcatcagtgatcagtttcaaggaaaacccatttagatatgaacatgcgcttctcaagctaggtgtagcattagttgaactctttgatgatacagagaaaaacgtatggcaacctgatggtaagcagtattctccacatgaaataaaagtaaaattagaaggtaactcaacctcatggggtgaattatggcgtccaaattttagtatttcatgctcgatagataagaaaggtgaacctggtaaagacccacgctatataagccctgagtggttggcaaattatccacagactcaaaatgatgaacaaaaaatctattgggtttgcagtgtgctaagaagtgctgctttaggcaatgtagattatactcaaagaaatgatttaaaacttgataaagctaagtatgatggtatccattctcagttttacaagcgacgtatgggaatgttacatacaccagagtcaattgttggttcatatggaactataacagattggtttgcaagttttcttcagcatggattgcaatggccaggtttttcttcttcgtatataagccaagaagatatattgtcaattactaatattattgagtttaaaaactgtttattggaacggctaggctacttaaataagcagatatgtatttcatcgaatgttccaaccttaccgactgttgtcaacaggcctgaattagcatctaaccattttagaattgttacggttcagcagttatttcctaaggatactaatttccatccttctgacgtgactttggctaatcccgatgtgcgctggaagcacagagagcaccttgcggaaatctgtaagctaacggagcaaactttaaatgcaaaacttaaaactgagtctagggaacatacaagcacagctgatctaatcgttttttctgagttagcagttcacccagaagatgaagatatagttagagcactggcatttagaaccaaagccatcattttttccggctttgtcttctgtgaacaagatggccgaatagttaacaaagctcgttggattattccagactcttcagagtctgggacccaatggcgtgtccgtgatcaggggaaacatcatatgaccagtgatgaagtggctcttggcattcaaggatatagaccatcccaacatattatttcaattgagggtcaccctgagggaccatttaaattaactggtgcgatttgctacgatgcaacagatataaagcttgcggcagatctgagagatttgactgacatgtttgtcattgcagcatacaataaagatgtagacacatttgataatatggcttcagcactacaatggcatatgtatcagcatattgttattacgaatacgggagaatatggaggctcaactatgcaagccccgtacaaagagaaatatcataaattgatttctcatgctcatgggactggtcaaatagcaattagtactgctgatatagatttagcagcattcaggcggaagctacaaatatataaaaagaccaaaacccagcctgctggatacaatagaaaacattaaggatttttatggatactttagttaagttagctacaattatttctccattaattagtgctggagtagctatttgggcaattttggttgctaaaaaaaccatcagtgaaagcaaagaaattgccaagaaaaccatcgctgatacggcctaccaagcatatttgcaattagccatggagaacccacaattttcgaaaggctacagcgcagattgtagacaggagcgagaccctatgtatgatcaatatgtttggtacgtggctaggatgatattctgctttgagaaaatcatcgaggttgaagtaaacttaaaagatagttcttgggcaaatacgttggaaaaacatttgaagtttcattctgaacattttaagaaaacgaatgttgtcgaagaggctctctatattccccctattttggatctcataagatgtgcagctaactaataacttatcccaataggattatattccacacgataagcccactggaaaatgtaacatcccaagatagtttttgggattgtttcccagtgggcggaaagtatcatgatagttgtcacccccggtggagctgcaaagatttttatggggtgggtgttacattgcgcgataaatttgaaatcgtggctttaatttctgcttcttgctcaaaagcagactgtcagatttgattgtgtgctgccagtgagaagcgtcagatcaagtctgagctaatacaactgagttaagatgccgaaatctg

SEQ ID NO: 15 - DNA, 3679 bp, Escherichia coli
agggatacgccacagcaagaaatagtttacttattcctcattttgtcgactaaaaatcgacattaaacaaaaaattcaaacttaatcactttcgggaaaaatgtgacaaatatatgctcggactggttgcggggagcgtgtaacatggatacaaatcaaaattattgccagcctcactgatggattactggtgtcaagagccccccttcgggcatgaaacggctggctaattctgtacagactgtaatctaaggacgataacgcatgacatatcaggcaattttcactggctgggatgatctgacgattgaagaccttctggtcgcttaccggaaagcaaaagccgatagcttctttgagaatacatttcctgttgctatcaaatttgccgagtatgagcaggaattacttgaaaacctgcaaaaactcttagatcttttgcagagcgaagatggattcagtagcaataagaagttgattggcaaatttcgtttgttaccgaaaaaattaaccacaaagaaaaaacatgaatcccaaaatggacacgtccacttttctaatcctaaacgagcagccgaccatttatttaataattttgatctgataccagagtttcgtattattggtgacttcccggttgatagtcacattatctctgcactatggattaacatggtcgggcataaatttgatgccagcttagataactgttgctatggcgcgcggctaaagcgtattcgtaatgatgaattatttagcaatgagcaggataatccattccatatcagtgccgtgggttcttttagcccctacttccagccctaccaaaaatggcgtggtgatggcttaaaagctatacgtgacgagttggaaaaagatcgtgacattatcgccgcctcactggatttaaaaagttactatcattttattgatccactggctataacctctgatgatctctataacacactaaacataaaactgactgaggatgaaaaagcgtttactgcacagttagcagtattcttaaagcactggtctgacggcgcagcggcatttggaaagaaaatagcgtacaaaacacctgttattaatggtggtctggtcattggattaacagccagtcggatcatttcaaatatattgctacaccattgggataaattagtcattgaaaaactatcaccaattcactacggtcgttatgtcgatgatatgttccttgtaatacgcgatacagggacaattactaataatcacgaatttatgttattgctgcaagataggcttggcaatgattgcgtttatttgaaaaacgagcaaaaacaaatatggcaaatacagcagggcgagcatttccagggtaagaccaccatccagttacaatccgataagcaaaaacttttcgtgcttcaagggagggctggaatagacctgctcgacagtatcgaaaaggagatctacgagctttctagtgaacaccgcttgatgccttcaccggatcaactggaacactccaccgcagctaaagtcctttccgctgccggtagtgtaggtgaaaatgccgatactctgcgccgtgcggatggattaaccattcgtcgtttgggctggtcactgcaattacgctacgttgaaacactggcacgagatctgcctccaagtgaatggaaagaacagcgggaagagttttatcagtttgcctacaaccatattcttagggctgataatctatttgcacattttagttatctgccaaggctgcttggctttgctatcagtatgaatgaatggcagcacgcggaaaaaattgtacttaaagcttacgaatccatcaacctgttggcatcggtgattacttcaggtaaggaagtgaatataaatggttgcaaaactcgagcagtaaatgatctttggcgctgtataaaaggcacattaagctggctatttgttgatgcagcgacacgatattacagtcctgacagattatttcttgataaacgttcaaagaaagaagagtgccttgcggatacattttttaatcatatttcacaaagtctgacgaatctaaaggatttactggatcttcgctttgattcagcagatttttatttaaaagcgccattggtagctcgagctgatttagcaaaggaaccttataaacagatcgtaaagagtcagtcggcagaaaaacttgttaatcagcgtgatagtaaaaaagaagttaaaatactgaaattaatgagcgactcatcgcttattgatattgacgttattaagctatttttgaaatcaaccaagaatacccgactggaaaaagtggctaaaggaaatcgtaagaacgaaagttacctaccttacattttccctacacgtcctttaacacccgctgaaatatcagaactggcccccgaatgtgttggattaccctccacatccgacaaaaaaccagatgagagaccgtccaccatttgggcaaaatatactcaagcattacgcggagtatggatcaaaccgacgttgctagcatcggagcaggactcagatgaagcgacaaaaaaagctcggcctaagaaattcattcatattggcacagacaggaaacataaagttgtcgttgcgctaaccagcattaaaacagaggaggacgactgggctaaaatggcctgcaataaatctaacttgtcccgttcaaggtaccagcggatttctgaactggttaatgcaacattgaaactatctcctaaacctgattatgttttattccctgagctttcaatcccgttacgctgggttaacagtattgctgatcgtttgagttcggcgggtatcagtctaattgcgggaacagaataccgccacttagacgataatcaactgaagagtgaggccgtacttgtcctttcagataacagactcggctatccagcgagtgtcaaaatatggcaacccaagctggaacccgccgtaggtgaagatgaggcattattttcaatttatggtaagtcttgggattcgacacttaatgttaaacaacgtaagccggtatatattcatcacggcgtcaattttggcgttatgatttgctctgaactccagaatagtaaagcgaggatccgttttcagggcgcactcgatgcattaatggtattgagctggaataaagatctagatacgtttgcatcgttgattgaatcagcagcgctggatattcatgcctatactattttagtgaataaccgaaaatacggcgatagtcgcgtacgttccccggcaaaagaaccctttatgcgtgatattgctcgtgtgaagggcggtgataatgactttgtggtcgctgcaacgctggatatcgactcgttaagggcatttcagagcagggcaaaacgctggcctaaaggcggcgataaattcaaaccgttacctgaaggattccagttggcaaagaaccgcaaaaagctaccgccaaaataagaaactgattttcgctattaataatcagggtatttttgcgtgagatgttggtaaacatgatgtagcccttgccactcatgaccaatcgcagtatctttctcccgcgcctgcaaaatcaggcgtcgggattagcctcctgaagaaatcttatcggcgacacatgacgcgccagcgtctttttttgtgttgttcgcacggttacatc

SEQ ID NO: 16 - DNA, 3479 bp, Klebsiella pneumoniae
ttttcaaaggagtttcgctttccaaatatacaagaaatcattatttctaaaggtatctataagtggatgattcgttttattggaacagttgcattctcgttaattaaagcggctgcttccgaccggcgaatggtcattcagaagctgagaatgtggttattttttaaagaggaattggcatgattattagccttgaagagcttggccttgcctaccgaaaagcaaaagtcgatctgtactattcatcccatgtttcgctggaagcaattgcgtcttacgaagagtccctacatacgaatctgacggttctgcaggaaaaaatacaaggtgacgacgaatcatgggtggaagagaatgagttcactggcaactggtttctggccacaaaatctgtagacatgtcttgctgggaacagcagcgagaaccgcaagctaacggtctcatattttcctcacctgctgaaaagtgggcatatgcttgcaacccaatggctgataaaaacgaacaaaaaaaaatcaaagccgagtttcgagtaatggctcaatgcagtctggattttcatgttctctcgactctttggatgttaaaagtcgggcatctttttgatgccaaattatctacctgtgcttacggtaaccgcctgcgccgtactctagatggaaaagacatcaatgcactttcaattggttcttttcaaccttacctcagaccttttcgtgattggcgtgacaatggcattaacgccatgcggagcgcgctaagtgaaagcaaaaaaatcgtggcactcactgctgatgttagttctttctatcacgaactgaatcccgggtttatgcttgatccaaccttcgtcaaagatattttggagttggaactcactgctgaacaaagcaagcttaatcgattattcattaatgcgttaaaagcatgggcaattgagactccgttgaagaaagggttaccagtaggtctccctgcttcagctgttgttgccaacgtagccctgatcgagctggatcgcgttattgagcagcaagtcgcacctatatattacggacggtatgtagatgacatcattctggtcatggaaaatggtgcgaatttccgttccatggcagagctatggcaatggttgttcgcccgttcttccggcaaactggactgggtaaagggcgaggaaaacaaacagatcagttttcaaccaaactacctgcatgacagccagattcgttttgcaaatgcgaagaataaagtgtttatccttgcgggtgactccggaaaaaccttagtggaagctattgctcatcagatttatgaacgagccagcgagtggcgagccatgcctcggttaccgcattcctcgaacaatgttggaactgatttgcttgctgcaactcaaagtaatggcgaagtcgctgacaatttgcgtaaagcagatgcactgactatgcgtagggctggttttgccatcaaactacgcgactttgaagcctatgagcgtgacctgcaaccgggcacatggaaaggccatcgccaggcattttttcgggcatttattgatcatgttgtggtgctgccacaattctttgatttatcagtctacctaccccgagtgatccgactggccacggcctgtgaggactttgtcgaactgcgcaaacttatcttagcgctcgagaatatttgcgatgaagttcgagaaaattgcctccttaccatcaaggcgtgtcctgatgatcacctcccttttgaagcagagattattggcaaatggagggctcagctttttagcagtgtgcttgaagctatcgttgcggcatttcctccgcgtatttccaaggtgggtaagcaaacctggaatgaccatttaaaaaactggcacgcccggtgtgggctagacattcaatattcgggtcgtgatttttcattaaagggctaccaagaacagcaggcgagattattctctttcgacttagcgcacatgccattccgctttattggtctaccaaaagagatgattgctcaacggggcatacccgctccgaaaacagtagcccactgtgcggaagcagcagaattactgcctgatattgtcgttttgggtaatcaggttgtagcaaaatggtgcaaatttaaaatcattccacatggactgctatttgccacccggcctttcagcctgccggaactctttatcctaaacaatgaggcttatacagcttcagctcagcaagaaatgcgagctattattttcgctgttcgcggttttgtactcggtaataaaacaccttgtgtcgataaacaaggcatattgcaaatccctgacggccaatctgctggaaaatatggggttgccatatctagctggaaaacgtccatgtcaagctggactgcggcggtcatgcgttcagccgatccggatgcaaaccgttacgctcgcttatgtcgcttgcttgatggtgtgatagcccaaccacataacagtcgttacttaattctgccggagctctcactccctgcgcactggtttattagaattgcccgtaagttacaaggtcgcgggatttcacttgtcaccggcattgaatatttacatgccagtaaagcaagagtacgcaatcaggtatgggcttccttgtctcatgatggattgggttttccttcactaatgatttaccgtcaggacaaacaacgcccagcactgcatgaagagcaggaattacaacgaatagcagggctagaaatgaaaccagaaaagaaatggacaacgcctcccatcattcaacacggtgattttcgtttttccttgttgatttgtagtgagctgaccaatattagttatcgcgcagcgctgcgtggcaacgttgacgcgctgtttgtgccagaatggaatcaggatactgaaactttcaatgccttggtcgagtctgctgcgctagatatccatgcttacatcatccaatgcaatgaccgccagtatggcgatagccgcatccgaggccctttcaaagatagctggaagcgtgatgtattgcgagtcaaaggtggtattacagattattgtgtaataggcgaaattgacgtacattctttacgacaatttcaaagtagctatcgttctcctggtaaaccctttaagccggttccggatggatttgagatagagcactctcgaaaaatgttgccagaagcataagtaaaattggaaaaaaatatcgatgcaggttattaaagatgaggcaacatgccatagtcaatcataacctgcagatgtaatttgaaactgcatgttgagaattacggatttatttgtgtattcaccctcgcataaaaatgaagtagctttcatattccacactactgataccccctgaaaatatataactaaaaaaaacaattttaaaacatgaggtaggaatagcaatctgactgtgatgtagttatttttttgatgaagataattaggtgctcgttgttc

SEQ ID NO: 17 - DNA, 8446 bp, Pseudomonas rhizosphaerae
ccactacaccggtgaccatgatttattgatcgttcctccttagtgaaccgattctgcccgcttaaccttaccccctggggggtagatgtaagcaacggagttctgttcgccgccaggtcaaaccacgatgacttgatcggcaggacagggaccacaatagaccttcaggtcggaatcagggatagaaggggacatgggcgaccgacagatatgaagatatgatggctatggcggcatctctgcccaccctcaggtccaaagcgaaaggaatcggaatgccccgtatcaacgttgagaaactgctgcttgagatcgaaatcgacaaggtggcagagcgattgggtatggcgcttaggagcgaatcagctacgcgcaagctcacgctgtgcccgttccatgacgataaaactccttcccttctaattgatacgagcagagataattctggacagcattaccactgctttgcctgcggtgaacatggagatgcaatcgatctggtgaagggagttcttcatatcgatttcaaaggtgcattagagtggctgtcaccaaactctactaccacccctgtaaatagggcgagaaaacagaaggctatgcagcctgagcagccagaaggctcagggcttgcgcaagcttataagttatacctgttaagcaatgacaagcaacgactagctaactgggtgactgatcgcaagcttgatatttttttgatggaagatgcaggattcatatacgcacacaaaaactcactatctaaacaggtttcctcaagaaaagattttggaacgaagcgtgaattagcagcaacattggaagaagcgaacctaatacgcaaaatccttccaagctcggggttccaaaactactatttaaatctacagtcaatccacgacaacaactatatagactttttttcaggggatcgaatcgtattcccgataagagacgatcagaaaaaactactaggccttgccgcccgggcggtagatgagcaaccagcaaaatacctattctcaaaaaactttccaaaatccaaagctatttttagaatagagcaagctacaaccactctacgagcattggctaagcgaggcgaaacagatctacgcttatatatctgcgaaggattttttgacgctctaagattggaaagcttgggatttcctgcagtagcagtaatgggaacatcaattagcaaagaacaaattaagattatgaaagggcttagcgacacgctcccttcaaagctagcctctttgacaatctgtatttgttttgatcgcgatgaagcgggattaagaggagcatccgaggctgtactaaaattcttaggcgctaatctcgacgtggtatttgtatggcctactactgctcagcttacaagcgcagaccattcaaacacaagcataaaagatcctgacgaatatttgagaaatttgtccgcgccgcaggccaagtcacttatcgatgtttccacctatggacctgtagtagcagtactagcaaatcagtttggtgtgcatgccgacgaactgcttgaaaatctaaagtggaacagtgccagtcgctctcgaaaatacaggtcatttgagaaaactcgtgctgaactcaggaaagttgtagccaacccccatctccaatcaagcgacctttttttaaatggccgaacagatcttgactcggcggctcaaatagaatggattgattttttaagtgtcgacattgcgactgaagccgctccatcggaatgttatcttaccaactcaggcaccagactaaaccacgcccgactgctcgcctatatgggctcacgaagaggagagttgccctgcgaagaatcaaaatgggagcggttagatattgcggcaagtgcattcaatgtgttgctcgctgaacgattggctaatgaaatacatggacccatcgacccgttcgaggccgtatgggtgccgaggtccttcggcgcagaagagccgagattaaaggtgatgcctcaacctgaggatttaatagcgcatcagtacttactaaatgagctacttacagaacgctgggatgcttccgctctcggtgttacagcattcagccagtgcataccagctgtccgctattaccgcgaagaaagaaaaactgttacgacaggaatatctaccccctcagataacacccaacctattatacttgaacagacgctaagtttcgcctatcaaattgatatggaggttattgagggcaggcagccagcttcagatcagggaatgtttcgtccgttcctagactgctggcgagactttatgcagtcccttaaaaatcaagccaaatctataaattacgtgcatgttatccgcctcgatgtcagtcgatattacgaccgcatccgcagacacgtcgtaagagacagcattcaaccatttatacaacaagctctggaaactgtcgctgataatgcaccggcgtttgctgaactgatgaaaatacaagcatctgcggatgaagcagcggacaaatccgcaataattgtcgagcaattatgcgacatgctctttggctacccataccttagccctgataacgggagaattaataaatcagatcccttacgcggtattcctcaaggcccagtaatctcagcatggttaggctcagtggctttgtttccagtagatctcgcggcactggaaatgatgaacaaatacaatgtagacggggaaactcatctagggtatgcaaggtatgtagatgacatagttttactagctagcagctccgtacttcttgaggaactgagagagctagttgatcaaaaaactcggagcttagacctggcgttggtcgcgaaagctgacgctattccgccaatgtctgctgaggaatttgcagattatgcaaatcaagggcgagctttagaagcatctggtccagcgtgggaaccaccgttggctggcgatggtgaagcggggtgggagttttggtcaggcactcccccctcagatagacaatctgccctgcaactgctatcaaattgggagatatacaaaagcccaatagaaataatcttgcaaacagtgaaaacgtccttcctagctatggatttacgttctagcgagcttgcaaagggagcaaggctaatatggtacgttgtagcatccgacctcctctcagctgacattgatccaagcgatgcggcagatttagcgtgggaaatttatgatcgctattggaaggaatgtactgaggagtgtgggtggcagttaaacccggatagtttcggatgggaggcaccgaatctgttcgcacttgagggactggaaaagcttatagatcataaaaatagcctccaatcgggtttaactgctttagaaaataccgttcggcacaaacgcatctctttcctagctagaaccgtgcttggggagcggttcaaactgcatgctcttgaaagcagctctacgcttaagcaccagatagataaaagactagatctcctcgaatggaaagcgtcaaaatcgtgcggaatgcccgttcgtagaactaaatcctacgcagagcgatcaatgtatattcgctcctggcaacccttcaactggttccatgccgcagtagaagatttcatgctcgcggatcagtccagcggatccgacccattgagttcatatgtcactcagttccaatctatagaaaagagcatcagacctaatcacgccgcttcttatgagttcttccggtatttactgccatccgatggcagcgatagcgatcttgagtttttctcaaaaacagagaatcgatactccggcttagcaattcagattttggttgcattagtccctcgggaaagcataatacagattctctcaaatagagcgcgcttactttgtcctctagaagctggtaaaaaactattagtcatgccccctcttcctggcgtcaatcagcaacgtatagttgcttgccagatcgatagctcctcagaaaacaaaatcaaaaaaatcagctcgtttgagtgctatgaaatagattcaactaaaaccaataccacatctctagacttttttggtgcaaactctgcgggcgtagttgtgcttacacccacatggaacaccgaagcccaacctcaatccgccatacttcgatcaaactcagaagtcccgaaaaatcttttgttggaggtatttgagaaaccgtcaaccggtttcccttccgctattcagggattgaagcacgtagcctcactatatagagccattgtggtaataatggctgaatacgagaggcaaaatgatggtttagagcttatacccgcttggccataccttgccacagatatgacctctgggaactgctacctaatttgtgagggcgtaacgaaaggagaagtaggaaaccgagcatttgtaagagacggtgggcgggccctaagaaccattgagataccgatatacgaagcccagttgtggcgagccggggttgcgctaagcgattacataggcctgcacgacgatattgctaaatttagctcctccgaatccgaaatacctttggatgcgacaacgcttgccgccccgtcacagtacgtgctacgaagccaacttcgtaaactgaggggtgcctttgctaactcacaaatagggcggcgcgttatgcccccaagttttcttccggcaagtgttgaacgtgcgcttgagttattggagcattttccggaagactcagatagtacaaagatgcagctaatgcatctgcttgccactgaaaccgaaactgcgggaatgcgcgtccgctatgagaaaaatattgaggtcacagagctcacggtatttctacgtgcggtcgccgacagggttctaacgaaactacccttaagcataggtgaggtcattgctgcaccgactacagcagtcagtggcctgaggagagacctgagtggggtcttgacccttgccagaagcatatggtcgatggatgaagaagaaaaactctctccaatttttgcgtggaagatttttcgagctggaattgtaggtattggtatcgctgttgctctacgggggattatagcttcactaagaagccacggggggtttgcacgctttgagggatttgattttccagcggaatgggagcttccccctgccacagcagttttatccgaaccggcgacaacagataaaaccactgatgaaaatgtaagcctcctcgaccatttccgggtactcgtatcacatctcggacaccgaatgaggttggacgacaacggcgagccacaaatcccagaagaaatcagcacagaaataagaaaatacgctacagcattagcgggcctcactactaaagactcaactgcggtggacgcaagcgactggcctttctttgatatcagcgaaaaagtttttgataccctaaatatagaattattagagaacgtcagcaatctaatcaaaaacttagattccgcgcttggtctccaggtaattttggttacgcaacaatcatacggcttcaatgctcaaaccaaacgcttcactgactcaagaggacttgcatgggatataaagccatggatgatctcgcaatacccattgcgtgctcgccacgttgaggagtgttttgatcaagaccgtagaatcgtacgtgtatggagcgagatttacgaaaaaaacagtcaacgcctgctttctatatcagtactaggcgagcctttcgcatcaattgcactatgtaaggacttggaatcgccttatgccgagactaaaaatgtagacagcaagcacaacactgtattaggtcctagcgagcagggttctgaaagcgcacccatagatatttcaccgattcttgaaactgctgagcctgaggccgagactgccttagcagacacacaattaataccaaccccaaaccaaactagcactgaagacagctttgataaaatagatactgagcgtaatacaacacacaataaaaaactaccgcttaccgacgcaacactcaacgcccgaaagaattcatttagaaatagccagctaacagcctggagcgataggaagtccaataaaaaccctgcccatgttcgggtagctctatttcagtgggaccaagagctgagctatgcacaccctatggtggaggccaccccacaaaaatggcctttcagttccgtctgtaaaccagcagttttaaaagaacttaaacgcctatataactctccctatcaagcccttttgaatgcaactgaatctgccggtcaacaccacctatggaaaaacgaaaatatttccctacccagctggggtgagcttcgtcgtcggcgattattgctcaacgcagtgaacgcatgccagtcatttggcgtggacttattgatacttcctgaatactcagtccgtgcagaaactgttaagtggttaaaagaagagtgcttacccggaaagacggtagcggttttagcaggaacatttttagctttcgactccggtccgccccccctaaaacaaagcgcgagcctcaacctcttgtggcccgtaccgcgtgatattgccgaatgcctcaaaccgcttgcacccaaaacaaatgaagatgctatgtccttgagtgacaagattgacaagggcattgtattgcaatggggcagatcaaagaaataccgatcagtagctctaaatgagttcatccggcctggaactgatcctctcacccccctgttcatgcccggaaaaataatagatgaattgagacgtgcaaattgggatctggacgctgatggtgttgttaagttgctagccaacacagagttgccacttgcgaatttcatggagctgatatgctctgagattttcctgttcacgagcccaaccaacattccagagatggcaagagattatgtttcaatgtgtgcaagatttggcttcggcgctgcagaagctcaagtctgggcggatctcaaactactatctaaatggctttcggtctgttccaagcctggtggtgccgactctagacgatcaattttgatcgtacctgccgcgaccactcgtactgctgattattggatagcaggccaagctggcttgcttgccgccggcactacaactgtatttatcaatggcgtaggatctgggcttaagggtggcagttgttttattggcagagagagctggaaaacaggggctggttctcacggttacattgagaccattacgccataccatggctggtcaaaaggaatttactataatagcaaacatgacccactgagcgaaattgatcaagcattggtgatcgcagatatcgatcctcataacatgcttgaaggcaaacctagacctcagatgctgccagttcccttacagctagtggcatacctaccaatcgttgaaactgtcgacgaaacaagcttggaccaaactctctgtgacgcagttcaggttgaccataacaatattgcaagaattaatcagggtcagcgattgggtggacgacttaaaagtcgaaatgagttctggcaacttatcacgcaaagtataaataatgatgtcgacaacgactttatcattaacttcagtaaatactttactgatgggaaagcgattcttgagcgagcaaactctttcttcaacaatggacaccaacagcctttttcatcggtagttaagctagacctgctctgctctccggcactttacgactggctagaggccgatatgacgttgcgggagggtgaggcgttacccaacatctcagtcccttcatggaccaaataacttcggatagattacgagcccctaggataaagcctgtcgataggggctggtcacattccccgcagcagggcggtgccgataatagctgctcacatagcttagagagcagtcaccgcttggcactttggagctgggagagcgttggcatcgtagaatcgtcggcagtgaaaattcggtacagctacggtacggcacctagcttctgtcaactaattcaaactacactcaacaccatatactacggtgcctccagctatgccaacctacgttcagctaagaacgacttcactaggcatacatggtcgcccagcaactcataatcccttggtcgcaggttcgagtcctgctgggcccaccaagctttgagagccgcgctttgcgcggctttttttgtgaagccaagcactcagtttggtccgaacaccacgccaaagtgtttttcaagatcgcacatcccagaccacacgatgcacagacttcatgttgaagcgccgtcttcagaaataagctgggaaaaggtcaatagctttcaatttgtagcagccaaccgtgatcacaggtagagcacgggtcgatttgatcttgcaatcctttgggcagcaagacccttgggctgttcaccggcgttgctgcacaaccagccacgctggaatcattactgtcatcaaggttgagaa

SEQ ID NO: 18 - DNA, 2393 bp, Escherichia coli
atccctgaattccccgaaggtgaacaatccactgttcacccttcaccgtatattaacccgttatcacactgaaattaaaagagaaaaatgaaaggtgaacagtgtgaacaatcaaatcaaaaaaactttctactcccactatagcctgactggtcgtctccaaaacgagcggaaaagcatcaacaatgaatagttaactgttaactccgcgccaactcattaccacttaactcaatgatattaaatggaaaactatcgaaatgaatactctgcaaaattaaatgcaaaaaaatatatgccagtcaaatttcgttacgcactctcttccaagaaagagataaatgctttatacgtccaccatactatgttatttttttaatacggctctgccttaaatctgtgaggttgtttcgcctcgaagtatcttatgttagcacatcacgctaccaatcagcggttagttacttgacgtaactgttaattggctaaagtttgcatagagtgattgggcggagccgtaaatttagtccataaatacagtaacgaggtagagagtgtctttacatgacaagctactgatgcttagtctcaattcggcgaataaagaagaagatgagacaatcccggagttacctaagttagagcctcagccctatcaagctggaaataagttgaaatgggataataaagagctgaaaaatcagcccatcacttcaaagaatgacattaatgtaatatgcaaaaaaattgaaaacaaaagcattgtaattacatcagcaaacgatgtagccaatctgttagaagtcccggtcggacaattattatttattttatataataaaaaagataactatagaacttttgaaataaaaaagaaaaatggaaaaagtagaatcataaatgcacctcaaggcggtttatcaattctgcaagagaaattaaagccagttcttgagtacttttatcgccccaaaaaaccagcacatggatttattaaggataaaagtatattaacaaatgcagaaaaacatacaaagaaaaaatatgttgttaatgtagatttagaaaattattttggttcagtcactttcgctagagtatatgggatatttaaaagtaagccatttaatttctctcatcctgcggcgagtatattagctcaactatgtactaaggatggaaaattacctcaaggagcatgtacctcccctgttctagcaaatttagcatcagcctcactcgataaacacctaacccaactggcacgtagaaaaaacatcacatatacaagatatgcagatgatattactttttcatttaatcaacgacaagtcagagaaatcataacgctagataatgaaaataattttgaattgggcgaggcgattatctctgtgatagagaaaagtggcttcagcataaacacaagtaaattcagagttcagaaaagaaatgaacgtcaaaaagttactggtctagtggtaaatgaaaaagtaaatgttgagcgtaaatatcttagagttactcgttcattagttcataaatggagagaagacaagttaacatcagcattgttgtttgttactaaaaaaggttttaaggcaacaaataacgaacatgctatatcaatttttcgcaatcatatttatgggcgattgagttttataaaaatgatccgtggtgaggacttcccgttatatcttaaattaatggctgaaatgagtcatcatgatcctttaaaaacaaaagaagggcttagagcaatgaaagaaactgaaacttacgatgtatttatttgtcatgcaagcgaagataaaacatccatcgcaattccaatttacgaagaattaattaaattaaatatatcaacattcatagatcatgttgaaataaattggggcgattcattaatccaaaaaattaactcagctcttgtaaagtctaaatatgtaattgccattctttcggctaattctgtagataaacattggcctaagaaagaattgcattctgtgcttgcaagagaaatcactgaaggtgaagtaaaattacttactcttgtaaaagaagcagatgaagcaatagttgctgaatctttgccgctcttaagtgataagctttatatgacctataaagataatccggcagaagttgcagataaggttcgtgcgcttttaaacaagtgacagctactgtcaaatgtgtataaagtcattgatattttatataaaatcaatggattgcaatccatataagattccttatgcatcagtgacccggtgctcgcccggtcactgcttcagtcccagcagaactcagacgaggcgcttaacatctaacgggatgccaacccgacgtttggttttatcggctatctagcctatatagaagca

SEQ ID NO: 19 - DNA, 2139 bp, Shigella dysenteriae
ctattgtgagcgagaaacgcgctactactatatatagacagacaagatgcacttactgaataaatactcataacggagaaaccagctgtatagtgaacaatagatttccagtagcatatttttacttcacttttagttattaatatgataatcataaactacggctctgccttaaatttgtgaggttgtttcgcctcgaaggaactaatgttaggacatacgccaccgttcagtcgatggtaacgcttcttaactagtggtccgctaagtgatgcgcaaagtgattgggcagagccgaaacgtttacaatccgataggagttggttttgtcgctacatgataaattattaatgcataacttcgcattagccaataaaaaaagccctgacttcatatctgaacttcctcaaattgaacctaaaccatacagcaatggacataaaattaaatggataaaccacacacttactagcactgaagttactccccctgataacctgattaaaatatgcatattgattgagtcaggggaaattgctataacatcagtaagtgatattgccaatttacttggagttcctgctggccaattactttatatactatatcgtaaaaaagataattatcgtacttttgaaatagaaaagaagaatggtaaaaaaagagtcattaatgctccttgtggcggtctatcgatactccaaacgagactaaagcccgttcttgaatatttctacaggccaaagaaatctgctcatggttttataaaaggaaagagcatcattactaatgctgggatgcatattaaaaaaaattttgtcgtaaacattgatctagaaaactatttcgaatcaataagttttgctagggtttatggaatatttaaaagtaaaccttttaattttgctcatcctgcagctactgttttagctcagttatgtactcacaatggaaaattacctcaaggtgcgtgtacatcgccaatattagcaaatattgcatcagcttctctagacaaacagctcacccaatttgcaggaagaaaaaaaatatcttattctaggtatgctgacgacataactttttctttcaatcagagaaatattgatataatcaaaaaaaacgacgacggaagttatagtcttagtgaaactatagacaatattatttcaaaaaatggctttaaaataaattatgataaatttagagttcaaaccagaaatacaagacaaagtgttactggcttagtggttaatgataaagttaacattaacagaagatatataagaattacacgttcaatgattcatagatggacagatgataagctaaagtatgcacttctctttgctacagaaaaaggatatcaggcaaaggataataaccacgcaattcaaattttccgaaatcatatttatggaaggcttagctttataaaaatggttagagggaaagactatccaggatatttaaaactgatgtcatacatgagtcataacgatccattaaaaacccaagaaggattgcgagcaatgaaagaaacagaaaactttgatgtttttatatgccatgcaagcgaagacaaaaaagacattgcaattccaatatatgacgagttaactaaacttaaaatttcagccttcatagatcatgttgagataaaatggggcgactccttaattgataaaataaatgcagcactagttaaatcaaaatatgtcatcgctattttatctgctaattcagtcaataaggaatggcctcaaaaagaattaagagcagttttagccagcgaaatatcgagtggcgacgtaaaacttttgaccttattaaaaaaagaagacgaggaggtcgtaaacctatcattacctttacttagtgataagttttatatggtctatgataataatcctgaagtagtcgccaacaatattaaatcactcttacaacgataattctctcacaaaagaaaatgtgcagattgatgcgtattaagtattaatctgcacatacaaaaaaaataataaaataatacatttttcataacttgtaggtaacaacaatatatgtcgtaacgaatatttggataacctctataccctattaaccaaccaattaactctatgtaatctcgcagcc

SEQ ID NO: 20 - DNA, 2569 bp, Escherichia coli
cacgtaaatatgaaaactgttagcccacatagcccaacaaaaatatttgatagttaaccttctgttactaaagaaaacaggaaagtaaaagtgggctaaagcttatgcgccctcgatgttgggctagccccaaaaacggtaaatttagcttaagtgcataattggttagctcaaaagcattatttttcatttaaataaattagttaattggtcttgtttagatgattcaactgggctgactactttctttgtatatactccggataaattttcccagctaacttgcctaatcatcactctgatgccagaaatgaacagaacgcaaaccatctataacttattgaggattttgaaaaaaattgattgggggcttgagttatatgatgactatgctaatttaatacggcacatgcaggtagatttgttggttgtggtatcgcaatcagtgttaacaaggtcgggagtattcgccctctgactgccgtcaagtcatcttggcgtcaccgttaaatgcgtaagagtacctgcatgtgcattaacataatcaataatggaatttactgttatgtttaaacctacctatctggcaaggctgcaggcttgttgtaacaaatttgaactggctgatttgcttcagattaaagttacatttctgactaatgttttgtatagaataaggccagaaaatcaatacaaaaaatttactataaagaaaaagtctggaggagagcgggagatctttgctcctgatgaaaaactgaaagatattcaacaacgactttctgaacttctatatatatgccaggaagaaatttgggcaaaaaataatattaaacaaaatgtatcacatggttttgagaagaataaaactataattacaaatgctgagaggcatcgagataaaaatattgtatttaatattgatattgagaatttcttcccatcctttaattttggtcgcgtgcgaggatattttattgcaaaccaaaatttcaagttacatccaaatgttgcaaccattattgcgcagatagcctgcctggatggatcgcttccgcaaggaagcccttgttctccagtaataactaatcttatttgtaggattttagatttcagattatcaaagctagcagtcacatatggttgtagttacagccgctatgcagatgacattacgttttcaacaaacaaaaaaaacatccctgatgcattagtttctaatgagaaagaaaacgaaccaggtaagatattggtagaagaaattcatcgtgcaggcttcactttaaaccataataaaaacagagtgtctaggtgtacatcaagacagcaagttacaggtttaactgtaaataaaaaaataaatgtaagcagagagtatataaagaatacaagagcgatggcgcattctttatactttgaaggttcgtatacacttattgagaaagatggaaaacatagaaagggcacccttagtgaattagaagggcgatttgcatttatcgatatgcttgataaatataataatgtggaagcaaagaaaaatgcgcgtcctgagagatatgtggttaaaggatttgggttggattttaagcagagacttaactccagagagaaagcatacagcaaattcctatactataaaaatttctatggaaatgagcaaataacaatcttaacagaagggaaaactgacccggtttatcttaagtgtgcaattgattctttgtttttggattaccctcagttagttagagaggaaaaaaacacaaagaatagagtgttaaaagttaatttatttaaaaccaatgacaagaaaaaatattttctcgatttgtctggtggagctgcagactattcgaggtttttcagacgacatggtttactttgtaaagcgtatgaaaaacagcctcctaaaaatccagtgataattttattagataatgacacagggccatctgacttcataaatcaaataataaaggattattcgcatctaccaaaaaaagcggaggatgttagaaaaggggcgttttatcacttagagagtaatttatatgttctttttactccgttattaccaggggataactattcttcactagaggatttttttgaaccaaaagttttgcaaatgaagtataatggaaaaagcttcgataaaagcaataatcatgacagttctactacatttggaaaagatagatttgctacttatatagtaagggaaaatagaaaaactatcgatttttcattattcaaacccatacttgattcaattattgaaatcaaaaaacattttatcaatctacacccatcaaagtgatggttatgaaaagagataaaaatgctgatgtcaaaagaggcttatgctcggcacagtggagtgagctgccaaactgtcgatgactgggtagccggtggggcggaagtagttatgtcccgtagcaaggttaagatttgctcttgtgtgtggggaaccttagtcaattactttcctggcgcactgtgttagattttgtaaaattttaaaagactaaagatttaatatcacttctccatggaggttgtg

SEQ ID NO: 21 - DNA, 2405 bp, Escherichia coli
ctatacgccgttatagctgaattttccggtgatttcagggcacattaaccaatttagataatactatagtaatggttgggctgatttttcaagaacaaaagtaattttcaagctttgtaacatgttgattttccgcttttcgctcaagcgagctttcatctttgcaagcccatatgttcgtttttcaagcgattattcagatacgttaacttcccatggcagtgcatgactatgctgcatgaaatcgcatgatcgatcgaggatcgtctatgcttagaccagccagaaatggcgggcttttgctcatgtcatgcagctgcatgaaaaccactgcataaagtgggcaggcgtggcggggatacgagggcgcgctatcacgtaaaataggcaaaatacttctggaaaacagaaagttgaagtgatatgttcataaacacgcatgtaggcagatttgttggttgtgaatcgcaaccagtggccttaatggcaggaggaatcgcctccctaaaatccttgattcagagctatacggcaggtgtgctgtgcgaaggagtgcctgcatgcgtttctccttggccttttttcctctgggatgaagaagaaatgacaaaaacatctaaacttgacgcacttagggctgctacttcacgtgaagacttggctaaaattttagatgttaagttggtatttttaactaacgttctatatagaatcggctcggataatcaatacactcaatttacaataccgaagaaaggaaaaggggtaaggactatttctgcacctacagaccggttgaaggacatccaacgaagaatatgtgacttactttctgattgtagagatgagatctttgctataaggaaaattagtaacaactattcctttggttttgagaggggaaaatcaataatcctaaatgcttataagcatagaggcaaacaaataatattaaatatagatcttaaggatttttttgaaagctttaatttcggacgagttagaggatattttctttccaatcaggattttttattaaatcctgtggtggcaacgacacttgcaaaagctgcatgctataatggaaccctcccccagggaagtccatgttctcctattatctcaaatctaatttgcaatattatggatatgagattagctaaactggctaaaaaatatggatgtacttatagcagatatgctgatgatataacaatttctacaaataaaaatacatttccgttagaaatggctactgtgcaacctgaaggggttgttttgggaaaagttttggtaaaagaaatagaaaactctggattcgaaataaatgattcaaagactaggcttacgtataagacatcaaggcaagaagtaacgggacttacagttaacagaatcgttaatattgatagatgttattataaaaaaactcgggcgttggcacatgctttgtatcgtacaggtgaatataaagtgccagatgaaaatggtgttttagtttcaggaggtctggataaacttgaggggatgtttggttttattgatcaagttgataagtttaacaatataaagaaaaaactgaacaagcaacctgatagatatgtattgactaatgcgactttgcatggttttaaattaaagttgaatgcgcgagaaaaagcatatagtaaatttatttactataaattttttcatggcaacacctgtcctacgataattacagaagggaagactgatcggatatatttgaaggctgctttgcattctttggagacatcatatcctgagttgtttagagaaaaaacagatagtaaaaagaaagaaataaatcttaatatatttaaatctaatgaaaagaccaaatattttttagatctttctgggggaactgcagatctgaaaaaatttgtagagcgttataaaaataattatgcttcttattatggttctgttccaaaacagccagtgattatggttcttgataatgatacaggtccaagcgatttacttaattttctgcgcaataaagttaaaagctgcccagacgatgtaactgaaatgagaaagatgaaatatattcatgttttctataatttatatatagttctcacaccattgagtccttccggcgaacaaacttcaatggaggatcttttccctaaagatattttagatatcaagattgatggtaagaaattcaacaaaaataatgatggagactcaaaaacggaatatgggaagcatattttttccatgagggttgttagagataaaaagcggaaaatagattttaaggcattttgttgtatttttgatgctataaaagatataaaggaacattataaattaatgttaaatagctaatgaacagccctaacgttatgaacgctaaggctgatttttcg

SEQ ID NO: 22 - DNA, 1951 bp, Escherichia coli
aattccccgaaaatccgcccgtttttactgaaaaaagccatgcatcgataaggtgcatggctttgcatgcgttttcctgcctcattttctgcagaccgcgccattcccggcgcggcctgagcgtgtcagtgcaactgcattaaaactgccccgcaaagcgggcgggcgaggcggggaaagcactgcgcgcaagctatgtgaggtgatgtgtaatacatatcacgaatagcgtaggtagctgttggctttgcctgatcaaggtgacagtatacatatcttaaaatataaatatttatgattatttatttgaaagaggttgaataatgatttttgatgaaaaaagacatttatatgaagctctgctgcggcataattattttccgaatcagaaggggacgatttcagaaatcccaccatgtttttcttcaagaacttttacaccagaaatttgtgaattaatagtttctaatgagccggggaaaagaaaattacatggatacgattgtgtcgaatactcatcgactaggtataataactttcccagagtattatccttaattcacccaagagcatatgcacagttagcaaagcatttgtatgagtcttgggatgagattcgaaaaatcaaagaaaataaaaacagtatgattaaacctgaaatgcatcctgacggtagactttttatcatgaattatgaggatgcagaaacaagaactgtaagggagttaaacgatggatttggaagacgatttaaagttaaaactgatatcgcaggatgttttaacaatatatattcacactcaattccttgggctgttgtcggtgtgaataaggcaaagacatcaatgaataagcataaaaatagccaagatgttcattggagtgatagattggattattatcaaagacaaacaagacgaggcgaaactcatggtgtccctgttggacctgcaacgtcaagtattgtatgtgagataatattaagttccatagataatattcttgagaataaaggattcttattcagacgttacattgatgattatacatgttattgtaaaactcatgatgaagcgaaagagtttctccatgttttaggtactgaactttctaagttaaagttatctctaaatttgcataaaactaaaattaccagtcttcccagtacattgaatgatgattgggtgtcgttgcttagtattaactctccatccaggagagtattcaggaataatgactcggatatattatctgcatctgaggttataagctttttggattatgcggtacaacttcatctgacgaatgggggcggtagtatattaaagtatgctatatctttaattattaataaagtagatgaggcgtcagcaagagagatgtacgactacgttttaaatctgagttggcactatcctatattaattccatatttagatgtattgcatccaaagattaacattaatgatgaggtcaggttaaaacttaatgaggttttgaattcctgcatagataataagttttctgatggcatggcttgggtgttgtattattgcttaaaatattccattgatattgacagttgtctcattagtaagatttttgaaaacggtgattgcctaagtatttgtattttggataaaactggaagatatgataaggaaatagaagaattttctaaaaatataatttcattggattatttgtatgaggttgataaatattggatattgttttatcagcgattctattcagggaaaggatataatccttacaatgatgattgttgtttcgatataatgaaaacatatggagttaattttatgcctgatgatggttatcaaacgaaagctgaacactattgtaatatagtaaatagtccatttcttgagaatgatgaacaagtaataagttttaacgattattgttcataatttataattagcctccg

SEQ ID NO: 23 - DNA, 2141 bp, Escherichia coli
cctgtcaaaaaatccccgtaaatcccgctatttttaacgaaataagccatgcatccataaggtgcatggttttgcatgcgttttcccgttcctgtactcccgaccagcgtcagtcccggcgcgacctgaggtcacctttgcacctgcattaaaagcggccccttaagcgggcaggcgtggcggggagagcattgcgcgccaaagcgtattgatatactgccagcattttttgatactcacacccatctacaggagtaggtcactaccgatgtagagcttttccggattcagataaaaccacttagcatcggagcaaagtaactcaataccgaacaataaatatgagcccttcgtgaaaccgggtaaggtcaaactcataaaccaacaaaaggggaaaagtgggatatgtgaggcgtgtatgatttttatttattgggcttcgttaaaaatggtgatttaatagccctttaaatttatcactttttaactaactccgagggtttatggttatttttgatgaaaaacggcatttgtatgaagccttactgaggcacaattatttccctaaccaaaaaggttcaataagtgaaatacctccgtgcttttcttccagaacattcacaccggaaatagcagagctaatttcatctgatacatcagggcgcaggagtctacaaggttatgattgcgtggaatattacgccaccagatataataacttcccaagaacgctgtcaatcatccatccaaaagcgtactcaaagctagccaagcatatacatgataactgggaggaaatacggtttataaaagaaaatgaaaacagcatgatcaaaccagacatgcatgctgacggtcgcatcataatcatgaattatgaggacgcagaaactaaaaccataagagagctaaatgatggttttggacggcgatttaaagttaacgcagatatatcaggctgctttacaaatatctactcacactctatcccgtgggcagttataggggttaataatgcaaaaatagccttaaatactaaagtaaaaaaccaggataaacattggagcgacaaacttgactactttcagcgtcaagctaaaagaaatgaaacacatggtgttcctattggtcctgcaacctcaagcattgtttgtgagattattttaagtgctgtggataagcgtcttagggatgatggatttttatttagacgttatatagatgattacacatgctattgcaaaacacacgatgatgctaaggagtttttacatttactcggtatggagttgtctaagtataagttatcactgaacttacataaaactaaaataactaatctcccaggaactttgaatgataactgggtttctttgcttaatgtaaattcaccaacaaaaaaacgttttacagatcaggatttaaacaagctaagttcttctgaagtaattaatttcctagattacgctgtacaattgaacactcaggttggtggtggaagcatactaaaatatgctatttccttggttataaataatttagatgagtatacaatcactcaggtgtatgactaccttctaaacttatcatggcattatccaatgctcatcccatatctaggcgtacttatcgaacatgtctatttagatgatggtgatgaatataaaaataaattcaatgaaattttgagtatgtgtgcagagaataaatgttctgacggcatggcctggactctttatttttgcatcaagaataacattgatattgatgatgatgttatagaaaagattatatgtttcggcgactgcttgagcttatgcttgctagatagctcagatatatatgaagaaaaaattaataattttgttagcgatatcatcaaactagattatgaatatgacattgacagatattggctccttttttatcagcggttctttaaagataaagccccaagcccttataatgacaaatgctttgatattatgaaaggttatggcgttgactttatgccagatgaaaattacaaaactaaagctgagtcatattgtcatgtcgtcaataacccatttctagaagacggagatgagattgtaagctttaatgattatatggcgatagcgtagcttttaggcctcatt

SEQ ID NO: 24 - DNA, 3648 bp, Escherichia coli
gcgttgaatggtataactatggcacggttaccgcatgttttgagctgtaatcgaagttatgaaaattgctatataaagcggtcgctgttgtggagatacgattgcgggaagtgatggaaagagctataaaaagtacagaggatagtttaatgagggtattatgaaccgtcagccgtttacttcagcagcacttaaacgaaacttaagtgaaagtgagaaggcttattattttaaaaaaaataatgttgctgagttagaatcattaattagtgatgccgttttaattgctaatgagaattttcgctctggtgtgagtgtaaagaaactaaatattaagggacgctgcgtttacactgcttcatgtttgaaggaaaaaataatacttagacattgcaatgcaaatttaaaatgccttgaatcgcttcgtcccaaacaacgaaatacaataattagtgagcttaaaatttatttggaagaaggtactccattcaaaatatatcgtttggatataaagtctttctttgaatcaattgatttaccgcagctttttcagctcttacataacgaaacacgactgtctagacatacaaaaaatttgctagaatggtatcttaaatcgtgtgaaaggcttcactcttcgaaaggattacctagagggttagaaattagtcctatgttatcagaattgtacttggcacaatttgataatagtattcataggcatccagaagtattttattattcaagatttgtagatgatatggtaatcgtttcaagtggttgtgaatgtgaagcgtcctttatggaatttatacaagatgtattaccaaagggattggctttaaataaaaataaattaaaaatatctccatgcataccaaagagaagtaagggtttaaataaacaggataaattgcttcatgaatttgactttctagggtactcgttttctataatagacacacctttgagcaaagatggtgagattaatagctgttacagaaaggttgttgttaatttatctaaatctcgcctgaagaaaattaaaacaagaatagctaggtctttctactcttatcatattaatggtgattttaaactattgctagacaggatttcttttttgactagtaacagggatttaaatcgcaaaataaaatcgttaagttctttagaaaaaagcaagataagtacaggtatttattacagtaatgcgaagttagatgttgactccatatccctaaaaaaattagatgactttttgctatattgtgtgcaatctaatactgggcgtttgaatagtgttgcaaaaaaaccttttaatttgaagcaaaaaaaagaactgctaagaaatagttttagaaaaggctttgtggatagagtatatagaaagtataactttaagcgctatactgagattacaaaaatatggttataaagaaaaacattaaacttgataagaaagattatctcagggctttactatgtgatacactgcccggtgattgtccaattattttttcaaatgatggcttatatataaacttaacagaatatgatagagtttgtaatgatttgttacattttactccggtttcttctttcttaaaaaaaatagttaaccctaatttagactcttctattagtgtcgcagatcgccaccgagaaaagaagaaacaaagctccccatttggctattgtatagtaaaagatgcctttagccaaagacatctttctttaattcacccaagatctcaaattaattattcggaattttataaaacatactcatccgttatcacattaaatactttaaaaagtaatttttctattcgctacccacgtaaggtcgctaactctttctttttatatgaaaataatgctttggaaaaatataaaggggaagatatcgaaacaacaaaggatgagttaatgaggaaatattcatcctcttattttagttatggcggtttcaacaggatatataaactatttcaaagtaagatgtttattgagcttgagaaaagattctcggtgatgtggatgttagatgtatcacattgttttgatagcatatatacgcattcggtttcttgggcattaaaaaataaatcatatatcaaaaaacatgttaaacacagcaatcaatttggacaagaattagatacactgatgcaacgtagcaataataatgaaacaaatggaatacctattggttcagagtttagcagggtttttgcagaattaatatttcagcgaattgattgcaatattgagtcatgccttcttagtgaacatggatgggttaataataaagattatgttatattgagatatgtagatgattttattgttttttgtaatggtgagtcaagtgccgaagttattacaaaaataattaatgtgaagttaaatgaatataatctacaattaaatgtaaacaagcttaagaagtattctaggccattttgcactagcaagacaagtttgattgtcaaagttaatgaattaattcgcaatttagaaattaaactgtatgaaaaacgtgatagtggctttactttaaataaaataagaagtaagcatgatttaaagatatatgtaattaatcatgtcaagtctatatgcattgaaaatcaagtgtcttattctgatgtttcatcatatataatatcatctctttccaaaagattaatatcaataattgatatattacgagttcaagaaaatgaagatgatgtagatgtaaaaaaaaggattaaggacttaattttcacaataaccgatattatgttgttctttttcagtgttaacccaactgtttcatcatcttataaattatcaaagacaatggttgttgttaataactatttgaatgaaatatctagtgactatagtagtatttttatgactacgttagtgaatgctgcggaaaacattaattttggtgagaatgataatgggctgtttattgatgatttcatttcaattgaaaaggttaatttaatcttggctgctactttttttggagataattatcttataagtgacagtttttttcatggagttatacataaaaagaaattggactactttactataatctcactgctattctattttagaaacagaagatcattccgaaaattgaagtgtataatagagggtgaaataaaggaaatattaagttctaatatggatttgctgcaatcatcggaaaaggcacatttatttttggatgtcatgtcatgtccatttgtctcaatagagacaaggcgttttttatatagaaaatatctcaagagctatgagccaaagctgaacagaagtcatctggagattgagaatgatttgcaatctctgcttcaaacatattggtttgtcaagtgggatgagttagatattgtgaaaatgattgagaaaaaagaattgaaagaaagctattaatttgataaatatgagtcgtggtcagtttcaaaatacttacgtcatcgtcgtcggtgtattttatatcgattatgaagacgatttcgctggaactgaaatcggcttgaatgcttaaacttaagctaaaaaaacagtttgagaccaaagcctaaattattaggctttggattttcaggttcagttgagagtaattgctgtctg

SEQ ID NO: 25 - DNA, 4236 bp, Acinetobacter calcoaceticus
cttgagtttgcgtaagataatttcgtgaaaattaaagcaattaatataaaaaatgtaattactagtgtgtacagatatgaaaaatgatagttataaaaccatatgaaaattgaagaaagagttcaatttttgccttgtcagtaacaaataggtagcttattgaaaaaagataaaaaattaacaaaaaatcaataaattcatatagaataaaaatattaaagaaatgaaataagtgtttgcttcatcagttttagggatacattaaagtggttgataaagaaaaatattatactggattaataaaagatataaaaatagtagcttatgcaagattcaataaaatacgtcgtttaaagagaaataattttttaggattgttatctatttcggtagtttctatcttagttattatattatcaattgtagaaaaaatttataatataaaaacaatgagtttaattccattgtttgaaccaaatatagaaatatggttcttttgtatacttgcttcaataattattctttgtatatctattgcactctctactatgaagattgatattgaaatagaaaggttaaataaaagtgcagttgaacttaatgaagtaaggcggaaaattgaatttaatattgagaatagtaattatcaaaatagtacattgtttgataaatatcttgaaataataaagtcagacttaataaatcatgatgaggttgattataaaataaataagtatttagtcagtaaagttggtagtaagtttgcttattatcgaatgtattttattgatcagaattttacatcaatattttatctttttataacatttttaagcttttcttcaattatttcaattattttgcaggtaatgttgaagtgataagacaagattttagtgtaaattccctgttgagaatcacaactaaaaatgaaattgttaaatttaacttgggtcgtaataaggaagagtatgctattgcattatctcaagtttctaattatctattagagggcaatgaaataatagataatttaagctgtagaatagaaagaaataaagttatatttagtactaattcaattaatactttttatgctttaaaaaaaatttctaaagatttaagccgattgtataaaattgagcctcctaatagagatgatatttctgaacaaatttatagaatttttgaacactctacaagctatagtattgtaaggttagacattaaaagtttttatgaaaatattcaatataatgaggtaattaaaaagctggatagagataaaatactagttgcaaaatctattaaaattcttaaggatttatataactttattgataatggtttaccacgaggtttatctataagtcctattttgtcagaaatatttatgaaagaagtcgatcaacaaattagaaatatagatcatgtatactattatgctagatatgttgatgacataatagtaatttcaacagataagagtgattctatatatgaaaaaacaattaaagttttagagaaatatgatttaaatgttaatagtaagagatatataaaaaatattcctgctgtgaacaataatgaaatctcaactttatataagtttgattacttaggatataagtatattatagatacaatttcatataaaaataaacgaatagttaaagcggaactgtcagatgataaaaaaagaaaaattaaaactagaataatacatagtcttttagatagagtttataatacaacgcattatgatcgggaggagttgttaattaagcgattaaaagtgttatcctctaactactcaataacatataatgaattgtcaaaaactaatttaaaagctggtatgttttatagtcataggttagtaaataattatggtatttttagtgaatttaataaatttttatctaaagctatctactgtcaacaaaacaatttctttggtaaagctatgtcgcagattcctagtaaagaaaaagaaaatattattaaaagtatttgttttgttagtggatttaaagataaaaactttattgagttagagagggttgaaatggaacgagtaaaaaagtgttggaaaaataaacgatataagaagctttgaggtaaaaatgaaaagtaagatttatttagataaaaaggatttttatagagtattgttaactgatgtattaccctatgaagtaccttttattttaagtaatgaaggtttttatagaaacttaaaaagcaactcatttcattcagttactaaaaaaatattagaattaactttatttacttcacaagtaaacactaatccttttaattttaaaatctctaaagatgatagtaattttaggaagttatatttagttcacccaagttcacaaataaaaatatcaaatttatataaaaattattatcaattaattacgcatttgtgtagtagaagttctttttcacttagatatccaacttatgttgcaaaagctttttatagtatagaaagagatagatctaattccgaaaattataaagatgaagatattgaattactgtcacaaaaaagccctaaatatgcaagtacttattttgtatataaagatatcagttttttatataaattctatgattcttatagatttcaccgtattgaaaaaaagtttaataaactattaaagtttgatattgctaaatgttttgactcaatatcaacatttcaattacctagatcagttaataaaaattgtagctttgaaagtcatacagatatacatagttttgaacatttattttcttcaattatgaaaggtgcttatcatggtaatacacatggtattgtaataggaccagagttttctagaattttcgctgaaattttattgcaatctatagatgtagcaataaaaaataagttaagaaatgaaatgggaattaaggagggtgttgattatgttataaaaagatatgtagatgattattttttattttataataatgagcaaacttcaaatttaatttttgaatgtattgttgaagaactttctaagtatagactattttgcaatgaatcaaaaagtattaggactactattccttttattacaggtattactattgctaaacatgaaataaggaagagattagaaactttttttgaattatttgagtcaataaataataaagatgattatattgggctaaaattaaatcattattataaaatatcaaatcaattaattagtgatattaagtgtattgtttttaataataatgtaagttattcaagtatttctggttatttttttactttaatgaaaaatcatgttttgcatataaaaaatagtttttcttttgaggataaatctaaagttgaaaatttaagtaagttatttcttattattcttgatgtttcgttttttgtttactgtatgaattttaaagttagaagcacatatttaatttctcaaattatagttttgattagtactattgctgaatcatttgatttaaatttgatagatttaattaataaaaaaatatatgatgaggtggatttggttttaaagataaagtcaaattcaaacttattgaataatattgaaattttaaatctattaattgctgttagagatattgatcttaattatcagatcttagtagatgatcttatgttattgttttcttcagaaaggattaataagtataattatttctctttaatgacttttttattttatgttcaaaggaaaaaacagtatcagcctatcagagatagaatttatgcaataataattcaaaaatttaatcagaataatctaaatgtctcaaatgattctgagttaattcacattttttttgactcacttagctgtccttatttaactaaaaatcaaaaaattaatataactaactctgcattaaattctattattaaattaaatgataatgaaattgatgtttttgtagaagaaatgagcaaaactaattggtttattgactggaacttgcaaacaaaagatgcaattcagcgtttgctgatgaaaaaagaattgaaatcaccctatgaaaattgagataattaagctagaaactagatatacctccgacatttgttggttgattttacacactatataactcctagtttctataaaaggatgtttctaacatccttttattttttttgagatttaatttttcttttagtgacaactaagttttactataactaatagc

SEQ ID NO: 26 - DNA, 5533 bp, Escherichia coli
actgctcgacaaaacgaaccgttcattcgcgaggatggtggcagtgaatgaggtggtcagttttatcagcgcttcaaggtagctttataggatggattgtagcgaagtgcccaacaaattgattgaagctaagggcattgagcattgcatgcatcatgctcagactgacaaaaaatcaaaataaatggattgatacggacatgacagacagcgtacagactgaaactaccgagggaaaaatcatcatcaacttgtttgctcccaatcttcccggaagtaccaaagaagatgatctcattcagaaatctctgcgtgaccagttggttgagagtatccgaaactcgattgcttatcctgacaccgataagtttgctgggctaacacggtttattgatgagtccggccgtaatgtattttttgtggatggtactcgcggtgcgggtaaaactacttttatcaatagcgtggtcaaatctctgaacagtgatcaagatgatgtcaaagtcaacatcaagtgtttgccgaccatcgaccccaccaagttgccgcgtcatgagccaattttggtcactgtgactgcccgtctgaataaaatggtgtccgacaaattaaaaggatactgggcgtcgaatgactatagaaaacaaaaagaacaatggcagaatcatcttgcacaacttcagcgtggtttacatctgctgacagacaaggaatataagccggaatatttcagtgacgctttgaaactggatgcccagcttgattactccattggtggtcaggatttgtcagaaatctttgaggagctggttaaacgcgcgtgtgaaattctcgactgcaaagccattttgattacttttgatgatattgatactcagtttgacgcgggttgggatgtacttgaatctattcgtaaattctttaacagccggaaattggtggtggtagcgacaggtgacttgcgtctatattcccaattgattcgcggtaaacaatacgaaaattacagcaaaactttgctcgaacaggaaaaagagagcgtccgcttagcagagcgaggctatatggttgaacaccttgaacagcaatatttattaaaactttttccggtacaaaaacgtattcaattgaaaacaatgttgcaattggtcggcgaaaagggaaaagccggtaaagaggagatcaaggttaaaaccgagccaggcatgcaggatattgacgccatagatgttcggcaagcaattggcgatgctgttagggaaggccttaatttgagagagggatcagatgctgacatgtatgtaaatgaactgctgaagcagccagtgcggttgttgatgcaggtgcttcaggatttctatacaaaaaaatatcatgccacatcggtaaagcttgatggtaaacaaagcagaaatgaaaggcctaatgagttatcagttccgaatttacttagaaatgccttatatggctcgatgctaagcagcatttatcgtgcagggttaaattatgaacagcatcgatttggtatggattcgctctgtaaggacatttttacctatgtaaagcaggatcgtgattttaacactgggttttatttacggcctcagtcagaaagcgaagcattaagaaattgctctatttacttagcgtctcaggtgagtgaaaactgtcagggcagtctgtcaaagttcctacagatgcttttggttggttgtggctctgtcagcatattcaaccaatttgtgaccgagttagcacgagctgaaaatgatagagaaaaattcgaacagcttattagtgagtatgtagcttatatgtctgttggcagaattgaaagtgcctcacattgggctaatcgatgttgtgcggtggttgcaaacagccctaatgatgagaaaattggtgtttttcttggcatggtgcaattaaatcgtaaatcacgacaacacatgcctgggggttacaaaaaatttaacattgatactgagaatggcctagcaaaagccgcaatggcgtcttccttgagtacggtagcttcaaataatcttatggatttctgtagtgtttttaatctgattggtgctattgcagatatctcagcatgccgttgtgaaaggtcagccattactaatgcttttaataaagttatagctcagacaacatgtattgttcccccatggagcgaggctgctgttcgtgcagaaatgaaaggctcaagtaaaagtgcagataacgatgctgctgttttggatgtagaccttgatcccaaggatgatggcgtgattgatgaaagtcagcaggatgacgcaacggaattttctgatgccattactaaagttgagcaatggcttaaaaacgtaaacgaaatcgagattggaattcgtccgtcggcacttttgattggtaaagtatggagtcggttctatttcaaccttaataatgtagctgatcaacataaaaccagactctatagaaatgcagagcatggacgaatggctagtcaatcaaatgccgcgaaaattatgcgttttaatgttttagcatttcttcatgcggtattggttgaagagagtttatatcattcggttagtgatagggaatatatcggtgaggggttaagactaaatccagttacttcagttgatgagtttgagaaaaagataaaaataattggtgagaaattaaaagcggataataaaacatggaaaaatacccatccattgtttttcttattaattagctgtccaattctacatccgttcatttttcctgttggtgggattaattgttcagtcaaagcactgaacaaagaaacaagtttcaataagctgattgatgaaattgttggcgataaattactttctgatgaagaatgggactatctgactaaaaataatgatcaaaaaacaaacactagacaacaaatttttcaaaatactataacatcgctgaattcctccacaatcgtcggagcatcatacgataaggatacaccagccaggaaaaccaagtcacctttattaggtgatagcgaagaaaaatgataatggccttcgtataaggattgggtatggaaaggtttcttcttaactcaacagttctgttatataggctaagcacagtctctttggatgaggtatcacttgatgagagagtggagtcatctgtattccttgctcaatacgaacaggctcgtagtttacctgatcatgtagctaaatctgcttggtcatatttagtgcaacaaatcaaacagcggaatatgaaactcggcccagtagcaatcttacgcctgatagctgaaaagtttattaaaaacgagaaaggtggccccaaaatcgatctacctatgttctcggaatggcaaacgctgatgagtcgagtatcgtgtctaccaattatagcgtgtcatcaggtatttaatccagggccagccagtcaggaatatagttttcgctggcctttatacccatatcacccgacggttgaagactacattacccgtgaatgcttacatgaaactcaccaacacctaaatggcagtaccagtgcagaagagtgttggctggatgcactcaaacacccagaagcatgcctcagagattttgagaagggctgggcatctcaagagatgaaacaactctgcgcccagattgatccatctctgacacctagaatcttcaaggatcgtttgcaaatcgcctgtaatattcgcgaaattctttgtcgggttgctcagggcgtggaattgccagagtggatagcatcaatgcaaaatccgcagcaactggcgaatagcacaattctgcataatggccgggagtatgggtttgcgacagtttggccaattgacgacaaatacagtcaggagtctgagttttgctggctaaccggattgttggaaaaatggcggtttaatgcgccagaagggttagaacgattgctttggatttacctgctgattcaaaatcagtacttgaccttactggttcagcgagacgattttttcggatttgaacagttccagaattacaccatgacggagttgagggaggaaacagagaaatcttatttgtctcgttttaaacatgctcatggtgcaggagtgtattctcaggtgcgttatctggaaggacgttttgctccgaagagcgaccccaacaaaatgcaaaagctgctcttcagtgtgttaagaggatattgggaatatctgagtgctcatatgtccatggaatgggtgcatgaaaagcctctgactatatcgcaagtgctcgataacctcgaactggttgaacctcatggcaagtgtgtagagctggcgctagtgccgcactttatcaaaagaaagcccaaaaatggtgaggcctatcctcacgcattactattcaaagacctgaaaaatcaggcagctattctgatggacatgctgaagtctgaaccgcgtctgacaggctggattcgaggagtagatgccgcagctaatgagatgcacgcaccacctgagttattttgccccttgttccgggtactagccaaatcaggtattgctcattttacctatcatgttggcgaggactttccgcatctgatcagtggtattcgctccattgatgatgccttgagatttttaccattgcgtaatggcgatcgtcttggtcactgcacggcgattggtattacacctagcatctggaaacgctctttgccattgtccttatccatgaccaaagagacgagattgctcgatttggtgtttatctggcgggaacttcgaagtcatccggaactgctgcgttacgctagtgatgcagcgattgaagctgttcgcttggctcataaagtgttttcgctggaagaggaagtctcgattaccacccttgatcaggtatttgaaatgcgggggctgttggccgaatcggaaggcctactgagtgagctaaatgaaccattaaaacccaaatccctctggttggaagagtatgagcgcgccagagagttggttaaaacaacgggtatgaaaaggccgttgaagttgtataagcaatggctaacatctgacaatgtgcgaaagcagcgtgctgaatatgttgaagttgccctagaatatttgccggatgaagcagttgttgcattacaacaagctgtaatggcaaaaatggcagaccgaaacattgcgatagaatgcccaccgaccagcaatacacgtatcagtcagtaccgaaacgtcagcgagcatcatatctttcgctggatgggcttgccgggtgaggcgattgaaggtgatgttcctatgtctatttgccttggctctgatgatccggggatcttcgctgcggacttgaaatccgagttctatcatctgttcgttgtgttaacccgaaagttcggtttgtcgccagcagatgctttgagaaaggtagctgaggtgaacgagaatgggcgcatttatcgctttcatgatgtcagctagcctgtatacattgaggattctgtaattgttcaagaccagcagtgctcattgctaactatctat

SEQ ID NO: 27 - DNA, 5526 bp, Citrobacter rodentium
gaggatttatgcacaaaatcctgatgcgaaatgttttcaaaaattgtcaggttaacgttcctgcagatctttgcgttacatgtcatttctggatcctttcccgacaggttaggttgtgattgatatgatgcccatctctcattttagtgatcgttatccctttataaacaggagtttatatgttatctatatgcaatagacttaaatcgatatacgtgcgcagcttacgattcacctctctacttactatttaaggaaaagagtgaggggagaattgattttcattaagatattatgagagaattatgactagtgaaatagtgttaaatcttgatttcccagaatataaggatgatttttgtactgatagcattgatgagcaagataatgagttgtggcagcaacaggccaataaaaagctactttcgtttctcgaggtgatgggggaggaagcaagacgatataaagaaaataattcccgtagtacgcatccacattataagacattgagtagttatcaccatgcaatctttatcagtggcgcgcggggggcggggaaaactgttttcatgagaaatgccagatttagctggcaaaaacattataataaagatctaaaacgccctaagctatattttattgatgtgattgacccgacgctattgaatattgatgaccgtttttctgaagtcattatcgcttcaatatatgctacggtagaaaagcggatgaagcaacctgatattgcgcagaatatcaaagataattttattaattcgcttaagacgttgtccggtgcattaggtaaatcaaaagattatgatgaatataggggcattgatcgtattcaaaaatatcgttctggaatccaccttgaaaaatatttccatcagttcttgatttcaagcgttgagttactggattgcgatgcgctggttttgccgattgatgatgttgatatgaaaatagataacgcttttggtgttctggacgatattcgctgcctgttgtcatgtccattagttctaccattagttagtggggataatgatctttatcggttcattgccaaaagtaaatttgaggaattattaaatcgtaaagcaaactctaattatgctaaagaaggcagcgagatagcagaaagattatcagaagcatatattactaaagtattccccagccatgtgaagatacccctccaaccgatagatgagttgttgccatatctttatatacattctaatgaagatgaaaataaacaacatacaagctattctgaatttatcaaacttgtacaacaaaaattctactttctttgtaatgggcaagaacgaagcacaaattggccgcagccgagaagcgcacgtgaagttacgcaactaatccgttctttacctccgtctactcttagtaaggaagatgattcgggaactgatttatggcaacgcttcgctgtctgggcggaagaacgtcgcgatggattagcattaaccaatgttgaatcttatctgtttattaagaatgcgaaagcagtagaagatttaaatctgtcaaatcttattgcttttaatcctttactgcaaaaaggaaaatatccctgggcagaaaaggatttttataaacagcagtcccaacgtcggaaagagctcaatgcccccgaaacaaattcaggtatccttaataccgtattttccgaacaaaggaaagattttattttaagaagtatgcctgcgctggaactcattatggagcctatgtatgtcactaagacggtagcagaaaaaaatgataattctgcgcttatagcgatctatacccattctgattattacagccagcagcagaacagacgatgtcatatattttttggcagagcttttgaaataatgttctggtcagtattagcgaaaactgaaaatcttccacaagaattttatgaaaaagataagtttaaatctttatttggtaatattttcaaaaaagtaccattctactcaatattttcaatgaaccctacaaaggttgttgatgaagaaaatgacgatggcagtgaacctgatttttcgcaaaaactggacgatagcattaatgaactggtggaagatatatatatctgggcaaccagtaataaattgcgagccttcaaaaataaaaatttaatacccttaatgacgtgcgtttttaataaggtattttcacagatcaatgtactgagaaaaaacgtgcaggacagagttaaatttagagatgaacatttgtcagatctggctaagcgatttgagtatatgtttattaatgctatctttactttcatcagagaaggggtagttgtcaataccaatgtggcaacaggcgcagctcctgccagagtacgtaatttatcagagtttaataggtatgataaaacattatccaggaatatgtccgggattttatccgtgaaagaggataatggcttaacgatagtcaaagagagtgagggcgatatcgcagatctgttatttgaaatttggcatagcccattatttaaattaacaaccaggacatgttacccaataggtaaaataaattcgcaaaatacggcccaggaaaatttatcatcagattttaattcattttttgaaaatggtatcaacttcgaattgataaaacaatattattggcaaacttcaaatcatgataatatcaggacagcagacgttagggaatgggcaacttcacgtcttaatgaagcaatcatccttttttcatggatgaaagaaagcaagtctattaaagcgaaaattgacggacagagctacgagggtcggctctttcgcgggcttcagcaggcgctggaaggttatgaggaggtctgagtatgtttaatcaggatccttattggctcattcctaccctttgtctggcatcagaccgaattttttatgcacaattgcgagaccacttaggccagaaaagtagcggtgaacgcaaaaaagaaaaaaatggatatatactggtacaggcggcacaagactatcaattctattttggcggccgtattcggaaagaggatgtgcaaaataatgccttaatgtggcagatagaaactggtaatgaaaattgcttatcgatgcttgatagtttgtcagcatatttcctcacatggcgcggcaattgttttgaggtcaggcgtgagcgacttgaaccctggctgatgatctgttccgtgatagatcccgcatggattattgcctatgcataccaacaattgattaaacaaaatgttgtatgtgatagtgagcttatttctttgctgacagaacatcaatgtccatttgcctttccaaaaggcagaggggacatttcctttgctgataatcatgtccatcttaatggtcatggttatagttcaatttcaatgctgaactttatagatggaaattataaggttaaaaaagggataaaatggccctatcggcaggaatacaccctctttgaaagtggtcttctggataaaaatgatcttccccgctggctgtccgcttatagctcttgcttacttaaaaatgtatataattcatttcaacaaggaaaaagatccgaggtagatttcacatgtctgaaggatgcggtcgaaacggtgcttgcggatgaggataaatattattttttagaggtagcttcgctatatgatgttgtcaccttgcagcaaagagtgctttatgaagccgcccagcagaaatatcactcacatcaacgttggttactgtatacttgcggaataatgttaggtacagaatctgaagattatgcgaatgcgctggctaacctgatccgaatcagcaatattctaagaaactatatggttgtatctgcggttggattgggacaatttattgattttttcggcttcaactatcgtcgaataacaaagccagctgatacaaacaaccgagttcattatgattcttctgctggtatttccagagaatatcgtgtctctcctgattttgtactgggtagcggcgtaatgcctgatatatatgccaggcaacttttcgatttttattgtacccaagcacgcaagggcgtacccgaacaaggacatattgttgttcattttacacgttcctttcctgacaaaaaatcaacatatgataaattgctaaccgagtgtcgcgaacggttacgttctcagtgtgattattttggccgttttttaacatcgcttactttgcagtcgatagaatataaaaatttatctactgatgaagatcgaagcatagacattagaaaattagttcgtggctatgatgttgctggaaatgaaaacgagctacaaatagaggtatttgccccggttctccgggtactgcgtgctgctaaatttaaaggggagggggtgaactttaaaaggctacagcgcccttttattactgtacatgctggtgaggattattgtcatatactcagtggccttcgggctatggatgaagccgttgaattttgtatgttaggagaaggcgatcgtatagggcatggattagctctgggagtagatataaaactatgggcgaatcgccaaaagcgagcatacctgacggttggacaacatcttgataatttggtttgggcatatcatcaggcagtattactttctcaacatattgtcgagcatataccagtaatgcatgaattaagggataagatccattattggtctcatcaattatatagtgaaacttatacgccagatttactctttaaagcatggctgctccgccgtaactggccggattataagtcaatcatatctgatccagcaaatatcaatgaatgggtgcctgaccaacatattttagtcagtacagatgagactacagctaaggccagaaaaatttgggaacgttatttaaatagcggtctggcagaaaatgatgtttttaacagaataatttcagtaaattgtgcgcccgatacagcgcaaaatttttcaatgacctttaatgaaaatgaagatattttatccaaaggggaattattattgtatgaagctatccaggatttcttaatcgaaaaatatagtaggttgggtttagtcatagaagcttgtccaacctcaaatatttatattggcagactggagaaatatcatgagcacccattattccgttggaatcctcctgactcccaatggattaaacctggtgggaaatttaatcgctttggattgcgcacaggacctttatctgtctgtataaatacagatgacagtgcattgatgccaaccacaattgaaaacgaacatcgcttaatgagagactgcgccatacatttttatggtattggaacatggatggcggatttatggataaactcaatacgcataaaaggtattgaaatattcaaaggtaatcatttaagtcaggatttagataatttaatctaaatgtaaacaagaaatccacgcaaatgcgtggattttaagtcaacttattattctctgaaacggtttaaccgttcggaacaacagattaaatc

SEQ ID NO: 28 - DNA, 6689 bp, Pluralibacter gergoviae
tgtggttagttatcacagcactaacctattttcgagctttttgattgaccaataccatttcttttaattatgaataatgatgcgtcaaccgatggcgaacgggccaaatccactcttctacaactgcccattgtcacggtgtggaataattaaaaattttagatttttgagattattctcattaccatcttgattttatttggttttgcatcaaaattcatagttcacaagcttttctcactccaaaaacaactgtaaagggattattgtgaacacgatatacataccattagacagcggagagtctgcggttcttaaggatccagataccttacttccccgaaatatttacgaacagcttactcgatttattgaaaaggctgttaatgaagtaccgaagcctcacgaagcgcttaatgaaacccgtagccataaggctatatcgattgacggcgcaagggggacaggaaaaacgtcggtgctagtgaatttgaacgactatctgcagagtaatgctcagcaactggcggggaaaattcatatccttgatcctatcgatccgactctacttgaagatggtgagtcgctgttcttgcatattattgttgctgccgtgcttcatgataaagagatcaaaactgcccaaagcagagacctcgataagtccagagtgtttacccagaagcttgagaacttggcacacggactggagtccgttgatttgcaacagaatcaacgtggaatggataaaattcgctccttatatggcagcaagcatctggcaaattgcgttgaagagtttttaaaatctgcgttggagttgatcggaaagaaattattgatactaccgattgatgatgtggacacttcactaaaccgggcatttgaaaatctggaaatattgcgtcgttatcttacctctccgtatgttttgccggtagtgagcggcgatcgccgtttatatgatgaggtctgctggcgagattttcatggaaggttgaataaggattcagcatataatcgcaagaacacatatgatattgctagagatttggcaattgagtatcagcgtaaaattctgccgctaccgcgcagactgagtatgcccgatgtaagtgattactggcagcaagatggtatcgaagttacgctagataaaaatggcattcctctgcgtaattttatggcatggttgaaaatatttattactggccccgtgaatggccttgagggtagtgatttacctctaccgataccttcaatacgtgctttaacccagttcatcaaccattgcagggatttaattcgtgagcttcctgaaccattcagaaagaaagtcagtacgctggccttacgtcgtatgtggcaaatgcctgatgttcctcttgatgttcttgaaagttttgctgaaaaacatcgggaattgagtaaagaagctaagcgtgaatatggggaggcttacaagctattttatgatggactaaagaattttactgcttgggatagtaaggcttatctagaagatgataaacaatctgcatggctcgataggttgtgtgagtattttcgttttgaacctaaggctggggctgtgtttttaacgcttcaggcaaaacagttctgggtctcatgggcgcagggtgacaatcgtaatcaatcgattcttgcgactccgctttttcaacccttattgcataattttcgtgaatacgatgtctttgaaaggtatgatgatctttctgattgggaatctcagttaagaacaaggttaccggagagttggttgactgccattaaagggcaaaaaacgcttttaccctatcctgtagcagaagcgggaattaataccagtttaaagtggaggtattgggaagaattagagaactatgggtttgatcctgctttggaaagcaaggcaaatttccttttgtccacgttgatgcagaggaatttttatacaaactctaaacagtcagtcgtgataaatattggtagagtttttgaaataattattgctagtcttgtttcggatttagagttggccgacttgcagagaattagacaacgttctccattttactctgctagcgcgcttgcacctaccaaaacgttagatttggaagaggattttacgaaaaagaatacaagatttatgaataacagaagtgaaactgacagagacatttctgatgatattcttgttgatgtgccggataaaaatgaggacgcatggaaaaaaatttgtgatgaaataaaccattggagaaagacacacaatgtggctagtacaaacttatcaccttggctggtttataaggtctttaataaaacatatagtcaggttgctaataatgtgtttgttcccagtggaatgcaaaatgttgatgcggctctaaatgtttttggtagggttttttatgcagtttggtcagcatttggtagttttgaaaaaggcgaattgttcggactatccgatgtggttgctacaactaatattatttcggcaaaaaatttttataatcatgataacttccgagtgaatgttggaccgtttacgcctgagcaaaaccaaaattctgacagcgatcgtgaggcatatcagcatcgcaaaatgtatggtgaaaaaaccagagcggtaagttatgtattagcaactcatccgctgaaaaaatggatcgacgaggtattacgcactgagtttaaacaaaaacagaatgctcagattcagaccgagagaaaaatgccgattcaggctgagaaaattatagatatcagcccggcaagagagtttatcacaagaaaactttcattaaattcacactcccggttggttaaaacacgtataataaaacagcttaagatgttatatccaaactacgataaggctaaggacttcattgatgaagttacaaaccacttccctcagaatgatcccgcaattaatacgcttcagaaagcatttgcagaactttaccccgatggtgacaaataatgttaactcggtctctaagtgaacatgctgcagggtgttttttcactgatgagcgtctgtcacaacgctttctagatatccttttatcgccacccaaggattttgaaacgtggtcatcattgcaggaggaatctttcaagctgctcgttaagagcatcgatagccgatatccacgcacttaccggttaaccgacgtacgccagcttgtggggaacatatgtgacaacgggttactgacgagtccgacactaccttggctcgatgtcattgcggatcagttactgttgcggaatggcgacttactctattaccgcgaaaataaggttcaagactacgtgcgaatagctgcggaactcgaccctgcccttctagtgggatggcgtcttggcgactggcttttgcaaagcccaccgccgcgattgacggacataacccgtgtggtgatggcgcagaatccgttttttgctccacctgctaatgcaggtaaaccttttgccgaggggcacgtacatctcgggggagtgacggctggagatactattttggatggctatctttttgaagagattgaactacccaaaagcaaagatatgttgttgtgggcgcacaaagagcatgatgagttaacaccgttgataaatcgagcaaagtctttgcttacagttctactttctgccccccctcaaacggtttctgagcaaactcaaaatggttttgatcagcgtaaaactgtatctgagaagtacaaggcattacagaacccaatggatagcatccatcgtctcccagactggttattgcttgctaaaaagaatcgcggaactgaaagcgtcagccccggctggtttttaaaccaactggcgcatgcctccgaaaaaaaacatccctcgcgctggctgtggctgcagctatacctttgccactcttatcagcttaaagacactcatccactggagcgcacggcaatactctgtttttggcttacggtaaatgcgctacggcgtcacattattatggacggacaggggcttgcgtgttttaccgagcgttattttaatggtgctttacgtgcgggtaagaaagctgacagtagcaatatgcgctacctgtttgccggtaaagacgatgtggccgaagtgaaagcatccccaaaggctttcgatcatgagatggtcactggattttcctcgacattgctgaaaaccctcggcattccagctgtttttccaccgtatatttttggtgagcatgagattaagccagatgaacgcgtgctgcgctatattggagcactggagcgctggcagttttgtgggcacttttctcgctctaaaactgcaagtcgcggcaagcgagcaaaggctgatttgcaggctaactggacagaagcggagcgattgttacagaaactgtacagtcataatggctggaatcatcccgtcttcttagggggtaaacgtaacccacattttcattttcagccgtcgaactggtttcgggggcttgatgttgcaggggatgaaaacgtactaaaaattgcaggctttgccccgatgctgcgctggctacgaagtggattatatcccgtaccagaagggcttcgcgccagtatgagttttcatttcagtattcatgccggggaggattacgcacatccggcgtcaggattgcgtcatattgatgaaacggttcgcttctgcgaaatgcgggagggagaccggctaggacatgctctggctctcggaattgaacctgcgctctgggcgaaacggcatggtgaaatgatactacctctggatgaacatttagataatcttgtctggcagtggcactatgctacgcttttatcggcttcattgcctctcgctcaggcggtattaccgctgcttgagcgtagaattgcacgctttattgcacggtgcgaatggtgcaaaaagagacctccgcaaatagataacagtgtggtggggaaacaggcctgtagtgatgataaacctctggaaaatattacacctgatacgctctaccgggcctggctactgcggcgtaattgttcatatcgactccagcaactccacggcggttcccctttgacctcgcaagagaaatgtgcgctgccggattgggccacgctcagcgataaaggcaatgtggcggcgcagctttatcagcaaagacactcgagtctccttgacgatatgccgccgcaactggtagttgtgcgtgtagcggacgaatggggaactcaggagcttattggcttgggaaatcctggtaaactgcgtcagcaggctcttgacggtaaagatatcctccaagacattgatacgccggtagagctgcaatttatgcatgctttacaggactatttgctagatcactatgatcgtaaagggttaattatagaaaccaacccaacatcaaacgtatatatcgcgcgattcaaaaagcacgtagagcatcctatttttcgttggaatcctccggatgaagaactgttgaaaccaggcgctgaatttaatcgttatggattgcgccgtgggccagtcagggttctggtcaatactgacgatccagggattatgcctacgacattacggacggaatttttactactgcgagaggctgcgattgagcgtggtgtcagccgaacgatggcagaatattggctggaaaggctgcgcctgtacgggctggaacagtttcagcgtaatcatttaaatgtatttgaagttattgaatagaggattttatcgtgagtggtacattcccttacttgcaatatacggatgtcaatgggctacaacctaagctcaaagaagagttgaaaaatttacggagaaaagagtatttgtcctactggcctcgttttctgatacgtagaatttcgctttatgctcttccattcctcatgttcttcacttttttcttttgtctgagtctgacgaagaaagttggggcagaggaagtgactaatattcttggaaccgtgagtatatccttcagtagttgcctgctgctggggattattatttctggtgtcgtgttactcttgcagtggacgtgcttcaactgtaaatacagtccgcaggatacgaatggagttgttggggctcgtaagttaaattataaattacttgctcatgttgtatttgttattgcatgcgtgcttttatttgtttttatttattgcaccaataataaagtgttttatggttttatcgtgtttcttggtttgacattattaccattggtaattgaccgtaccttgggggtgactcgtcaaaatgaacgtcacaaactctatatcagaaggttagagcgcctcgatgaattgaatattctccgggagaaaatgaatattaaattcgaagaatcccatttcatcgagtatatgaagcttgttgatgaagctgatcacggaaaaaaccaggatacagtaagcgatacatcctattttatgacgttgatagaaaataagctaaaagtgtaatcggttttaatatgatgctgtataaaaaactacgcaattgcgtggttttttgtcggactatgagggcaaggttgccctaaaacagaggttaaacgttgggatgtgatttattgcacatcatgccgtgcccatccagtagaatccggttcgaaatgtgtataggattgtgtatatgtttctgttcggtctcggattcttatacac

SEQ ID NO: 29 - DNA, 4415 bp, Escherichia coli
accgtgctggcatgtttttacggagtgacgctttcattaacctgtacacgaacttctattccggcatcatgacaggcctgcagccactgcgccacttccagcggatcgccctcccggcgtaccactctgccttctttattccataactgcagacaggtgctgccgtcgagacgcaccacaaaatccccacggcaggcctgataggggtttgagggccaaccgtacgaaaacgtacggtaagaggaaaattatcgtcttaaaaatcgatttatgctatcacagtcgtctcttcaggtaagtacggttgcctttgcctgctttcttctcgtctggttaagttaagaaattcagagatccatgcttgagataaaagcggaataaaaccagtaaaatgtaactaaaacaacaacggaattgtatcaatgataatgtccacaccgtggctgacaccgatcgttgccgatagtgatcatgctgaggcaaatgcagtgagctatgaagcactgactccgacagaactcgactcagataaagcaggctgttatatcagcgcgcttaattatgcttatgaacatccggatatccggaatattgctgttaccgggccgtatggggcagggaaaagctcagtattaaaaacatggtgcaaagctcacaatgggacactgcgggtgttaaccgtttctcttgctgattttgatatgcagagacatgtggatgaaagtaatggggacagcagtagtgacgaagggacgaaaaatactggtagtgttgaaaaatctattgaatacagtattctgcaacaaatactctacaaaaataaaaagcatgagcttccctgttcccgcattgaccgtatatcagatgtgactgcgggacaaatattgcggtctgcgtcttttctgacaggaaccattttactgagtggagctgctttatttttccttgcgccggattacgttacaacaaagctatctttgccgggagcattcgcccgttaccttcttgaatgcccgtttggggtgcgtgtgtccggtgcagtggcatctgtgatgggatcgttatgcctgcttttgaaccagttacatcgtatcggtatatttgacaggaaagtaagtcttgataaagtggaccttctgaaaggcgctgttacaacccgggcatcatcaccttctttacttaatgtctatattgatgaaattgtctatttttttgattcgactaaatatgatgtagtgatattcgaagatcttgaccgttttaacaatggccggattttcgtgaaattgcgggaaatcaatcaaattattaataactgcctttctgacagaaaacctgtaaaatttatttatgctgtcagagatggtattttcaactcagcagagtcaagaacgaaattctttgattttgttatgcctgttattccagtgatggataaccagaatgcttatgagcattttgttaaaaaattcaaagaagaagagataaataataacttaagcgaatgtatttctcgtattgcgacatttattcccaatatgcgtgtaatgcataatattacaaatgagtttcgactctatcagaatttagtcaatagtcgggaaaatctggccaaactacttgccatgatagcatataaaaatctctgtgcggaagattatcatggtatagatagtaaaaaaggtgttctttatcattttattcaaagctacttagaccatgaaattcagaatgaattattacattctgcaaataacgaacttgaggatatggcacagtcacttgtagcgataacaaatgaaaaactcgcaaaccgggaaaatctgcgcgaagaactgctcatgccttaccttagtaaaaattatagcggcgcgcttgttttttatacagaaggaaggcaaataagtcttgatgatttgatacaagatgaagatgaatttctcatgcttttagataaggaaaatattcaggtcgttaccccctataacagacaaaattttctcatgataaatcagcgggatacagaaaaactgaagcagcagtatgaaaaacgatgccatttaattgaaactaaatctgttgataatataaccagagtgaaaaataatatttccagtctggagtcattgaggaccgaaattctttccggaactgtagctgatatagcagaaaagatgacaaatgaaggctttgttgcctggataaagaagaaagaggatacaggtgtcctgacgattcagtcggaacatgaacagattgattttatattttttctgttatcaagtggttatttatcaacagattacatgtcctatcgctcaatcttcattcccggagggctgagtgagacagataatttatttcttaaggatgttatgtctggtaaaggtccggaaaaaacattctcattccatcttgataacgttaataatattgttgaacgactcaaaaagctgggggttctgcagcgtgacaatgctcaacatcctgctgttatcagatggctgattgataatgaccctgataccctgaaaaacaatataatggcattactgagtcagacgggtagccagcgtgtggttagtttgctgatgttgatgcagaacgatttcacaacgtatgttcgcctgcgttacctggagatttttatgtcagatgaacatatactgaacagattgctggcacatttatgtgcgtcagaagaacgcacacccgagcaaaagttttttgttcaggaaatagcggcacacctgttatgcctgactgaaaaatcaaatatctggcaatcggttgagattaataaacgtatcggtgagcttatagattcctccccaattcttattactgctgtgccaaaaggatatggtgatgcgttttttgaagtgttgaaagataatacactttcagtttcatatattccaggtgatgtgggagacgagaagtgttctgttatcaggaaaattgcgggtgcaggattattcaaatattccgtcagtaatcttaaaaatgtttatctttgcctgacgcaagacaagaatgaagaaagaatgtcattctctctttatccgtttcattgtctcgagtccctggctatttctgaattaacagaaattctgtggactaacatagaagattttattttatcggtatttattgaatcggaagagattgatcgtattcctgaattgctgaattcttctgaagtctcaatgactgttgttgaacagattatagccaaaatggatttttgtataaataatctggatgatattattaatcgttcagagtgtgcggacaataatgcttcagggagaaatatctatagcatgctgttgcagcatgacaggatttttccatcctttgataatattattcatttattgcatgatacatcaattaatacttccggtgaacttgttcagtgggtaaatgagaaacactttgaatttgaaccatctgatatagtcataaatgatacaggaatatttaataattttatttctgaattaatttgctcgccagtcatttcagaagaagctttactgaaagtactgagtaatttaaacgttgttattatcgatgtgcctgaaaacattccattgcgaaatgctgaactgttatgttcagagaaaaaactggcaccgacagttaatgtctttacggtgttgtttaatgctctcagtgaaaatgttgatgatattaacaggatgaatactctgcttggtaaccttattgcccagcgtcctgagattattacccaggagccagaagatattttttatatcgagggtgactttgatgaagaactggcaagcgaactttttcgtcacaagctaatcggtatgaatataaaagttgccgctttacgctggttgcgtgataacaaaccgggaattcttgataagagctacctgctgtcattagatattctggcagaactgagtccctggatgggtgacgatgatctgcgcctgacactgcttaaacgttgtctggttgccggggatgctggcaaagacgcgctttgcgtggtgctgaacagttttgctgatgagagctatcatggactgttaccacatgacaggttcaggaaaatccctcactccgtggatttgtgggaagtggccgaattaatcagcaatcttggatttattcagccgccaaaaatggggtcagggcgtgatgaacacaaaattgttattactcccgtacgctatgtccgtgatgttgagttttatgactgagcatcattgatacggtgttttaattgccttaaatacaaaaataaaaacagattaatgcttaatgtgcattaatctgttttagttatcaatggctgttaattattgttaattttacattaatctttctttttcttcaggaagatccgaaaactcctggtcacggatcttcct

SEQ ID NO: 30 - DNA, 4037 bp, Escherichia coli
attatctgccaaccgataagatggctgcctaagtcgtagcgattcagcactgttttagcggcgctcgattgcaaagtcgtgctttgctgacttgcgattgtgctctttacgagcaaagctttcaggtatagtaagtgctaactgtagtgtaaaattatagggatagatgaagaaaacaacgaggctttagctaatctttgcagttgtgtctgctataataaggcgaaattttatctgcatgattttgtttgattaactccgaaagccagctctctcggtgaagattgggaagggatatcaatgagtgatgatagctataaatttcaaaagttaacgccgttcagcgatgttgagctgggtgtatataaaaatgcgatagattttgtttttgccaataacgatctaaaaaatgttgcgatatcagggcaatatagcgcaggaaaaagtagtcttatcgaatcctataagaaaagtcattcaaatataaagtttgttcatatctcacttgctcatttcagatcgattgaggaagctgaaactaatgaaccaagtaaagatataaatgaaaccgcgttagaaggtaaagttcttaaccagttaattcaccaaattaatgctgatgatattccccagacacattttaaagtaaagaaaaaaataaaaactaacaacattgtgataaacaccatctttacggtgttatttatcgccatgatactacatatcacgctatttaataagtgggaaaagtttgtttcacttttatctgaaggtaatataaagacactacttacattatcaactaaatacgatacgcttttaattagtgggtttatatgtactatcctatcttgtattttcatttacaagttaataaaaacccaaaagaatcgtaatgttcttaagaaaataaatttacagggtaatgaaatagagatttttgaagaaagtaacgagtcttatttcgatagatatttaaatgaagtattgtaccttttcgagaacgttgatgctgatgccattgtttttgaagacatggaccgttttaatagtaataacatctttgaacgtcttcatgaggttaacagactggttaatattcaacgggacacagcagggcacaagaaatcgacgttacgttttatttacttgcttcgtgatgatatcttcatttcgaaggatagaaccaaattctttgattatatcattccagttattcctgttgttgatagttctaactcttacgatcagtttatcacacattttgatggtggtggtattctcaagttgttcaatgaaagatttctacaagggatgtctttatatattgatgatatgagaatattgaagaatatttataacgaatttcaaatttattataacaaattaaacacgacagaacttgactgtaataaaatgttggccattattgcctataagaatattttcccaagagattttagtgagttgcaacttaatcaaggtatggtttataccatatttagtgaaaaagacaaccttattattgaagaaataaagaaaatagaaaaagatattagagatagaaaaaaagagattgaggcaatcaatgatgaaatactcaactctagtcaggaggttgatgctatatacgataaggaattatctagatataataatcatcctcactataatcaggctgagaaagctgatatagcaaagagaagggcggctagaaaagaaagtgttgaaaataaatttaatggtaaaatagaagaaattaatgagcttatatcaagatcaagagaaagtttggttgattctagaaacaaaagacttaaagaagtaataactagagaaaacattgatgaaatatttaaactcacctataccaatgaaattggagaggaaagagactttaatgaaataaaaagcagtgagcattttgacttgcttaaataccttattcgtgatggttatattgatgaaacctataccgactatatgacctatttttatgaaaatagcctgagtcgaattgataagatgtttttacgcagcattaccgatcaaaaaggcaaagagttcacttatcaactcaagaaccccaagctggtcgttgcccgccttcgagaagtggattttgaacaggaagaggcgcttaattttgatttattagcttatctgcttcaaacgccagcccaggtaaacttaataaaacgtttattcaaacaactaagaaaagatagaagagttgagtttattcgtggttactttgaaactgagagggctcagcctgtcttcattaatcgattaaatacacagtggcctgagtttttttcttatgcgctgacagagagtgaattttctgctgattgggttaaactctactctataggcacgttttattattctgccaatgacgccatcgaggccattaatattgatgattgtctgactgattacatctctgattcggcaggttatttagcaatatcagaaccgaaggttgacaaattaattagtggttttaagttgcttaacgtctcttttgtcagtattaaatttgaaaacgcaaataaagtactctttgatgcggtttaccagcattcactttatgatattaatttttccaacctgaccttaatgctgagtaaggtttacacgcttaatagtgaagatgatattcgccataagaactatacactagtgatgtcacaacctgattctcccttggctagttatgttaataaccatattagggactatctggatatggttttatctagttgtgatggttcaatcgtggatgatgaatccattgttttatccgttcttaataatgagggaatatctgatgaacaaaaaggccagtatataaacgctttgcaaactttcgtgacatctctgagtgaggttgagagcgaatctttatggtcatctttgttggataaagatagagcagtgtgctctgaggaaaatattgtctcttattttgaacatgttgatggactggatgactcacttatcgaatttatcaatagaactgatgtagacctgaattttcaaaatattaatattgataacgagcttaaaggtaaattatttaaatcgattgttatctgtaatgatttatcaaatgataaatatgaaaaattaatttgctcactaaatattatttgtaaaacatcctttagcgctagtaatatcgcgagtgataagttcaaaatattagtggataaaaatattattcgtatgaatgttgcgccacttaatttcatacgagataactattcagagcaactttcctattatattcataagaatatcagggcatacgttgaattaatgacgattgataactttattttggatgaggctatatcaatactttcttggaaagttgatgatgatttgaaagttaagctactcgagtttgttaaaactccgttggctatttatagtaagaattactctcaggtcgttaatgactatattttagaaaataattttaaaccagatgaacttctaatcttgacgtcatcttataaaacttggggaacctctactcagtcgctcatcttgagtcgagcaatacaggatatatcagcattgatagcaagtcctaatgatgtttctgaaccgttactaaaaaacctgtttgtcgcagagggactgaatatgcagaataaaatagcactgctaatcgctttgttgccgggtaaggatttgagtaagacgacttgcaaagagtatcttgatctgcttggtttatcggagttcagtaaaattttggggcgaggcaaacctaaaattgaagttgattcaactaatcaaagtttattaacagcattaagagataaccacttcttctctgattttgaggtggataatgaaaatcccacttattataaaataacaaggcggcgctctatgtttggctcagatacatagcattatgtatttttctacagtttgggcacttttatagtgcccaatttttacgctgaaacttacgcagataatctgactttttcccagttgacgagtacacctag

SEQ ID NO: 31 - DNA, 4891 bp, Escherichia coli
atctatagcagtcatcatattggattattggtgaagtggtacactgaatttgcccacctgaacagagttggttttatcaaacctgtagtttactcaatgacgtaaaaattggtgatgtaaaggatataaaaatgtggtcagacaaagagtcatcagaagactacctaaattttggtgaagtatctcagttagccgtggatgtacttaccacgaaagatatgttaccagtatctatcggaatttttggaaactggggggcaggtaaatcctctctgttaaaactgatagagcaaaaacttgagcaagacgacaaagattggattgttatcaattttgactcttggctctatcaggggtacgacgacgcccgtgccgcacttcttgaagtcatcgctacagaattgacaaaagctgctgaaggtaattctacccttatatcaaaaactaagagactccttagtcgagttgatggttttagagctatgggattactagctgagggtacagctttaatggcaggattacctactggcggtttgctttctagggggattggtgcattaagaaatatcaccgatggcatccagagccaggaagagtatgaggctttaggcaatatagctaaagaaggtaaagaaactgcttgtggtttgattaaaccacaaacaaaaaaaagcccccctcagcagattgatgcctttcgtaaggaatatggggaaattctagaagaacttggaaagccactcattgtggtaatagataacctagaccgctgtctccctgccaatgctatccatacacttgaagctatcaggctattccttttcttgactaatacagcctttattattgcagcagatgaggacatgattcgctcttctgtggctgattacttcaaaggggcatcacagcgccatcaaatagattatctggataagctaatccaggttcctattcgggtgcctaaggctggggtccgtgagatccgttcgtatctgttcatgctttatgccattgaacatggcttagaaggcgaaaaaataactatgctccgtgagggcttagagaaggcgttacagcaatcctggaaagatgaaccaatctcacgtcaggaggccttaaaaatgactggtgaagcggatgatagcaacctcgcgctggcgtttgcgcgtgctgaccgtattgctcccattttagccaactctccaattattcatggtaatcccaggatcgttaaacgcttgttgaatgttgtgaaaatgcgatctcaaattgcgaagcgacgagcaatgcctttggatgaagcaattattactaagctagtaatttttgaacgctgtgttggagtggatggcaccgctgatttatatcatctcgtggatattgaacaaggtgttccccagatacttaaacagcttgacgataatggcggtcaaatacctactgatgcaccaaagacatggactgatagtccaacgactaaatctttcatcagtcaatgggcccaacttgaacctcgtcttggtgggattgacttaagggccgccatatatctgtcccgagaaactatgccaataggtgcatatgtggttggtttatcgccatctggacgggaagtactaaatgcactaattgaattgaaaaacactagttctcctacagcagaaaaccttttgaaagcacttcctcgtgaggagcaaatacctgtaatggaaggtttaattaaccagttacggcaggtatcagattgggatcgtaagcccagaggcttttccggcgcatgtctgttggcccgctactcaacagatgcagccagcatattaattcgttatctacaggaattacagttggggatgaaacgaccagcgtggatgactgcagcattaaaagatgaacaatggaataaggacgcttaatgggaacatcacaatcaagtaaaggtccaggaggtggctctccgctggttccaccatgggctgatgatcagccacagcaaccgttaccctcgccgcaagaaaggaggtttgcgccatttcgagaatcgttgggaaatgcggtatcaaatggaaatcgagcagatttcagaaaagccatagggcactacgcgcgaaaagcctccggagggagcagtaacgctgctcggcgattagggagtgtcacgcaagctggggccgaattatttggggctttagtgggaatgccttcggctcccggagaaccaagcatcgatttgggcagtttggcaggccttccatgcgaaatagcaatatcaactattgctcaagctttaacatcacaggatggtgactcagaaaagatctgtgcggccatgaaccatgctttagtggaggctcttgatggcgtagaaattttcgatcctcaaaaaataactgatggtttgattgttgacacaatgattggttatctagcggaaagtattttccttcagatggtaatggattctaatagggcatggaacaaagcagatacaccttcaaaggcaattcatgcagaaattgaactccgggaattgattaaagttgttgttgataaacatatggcaccaaaacttgccggtaacataagatcgttcacacgaaaccaaatggtaaaaattgaacgtcaggccattattgaggcctggcaagaatgggaggcataccagtgacacaattagttttccatcataaacatcaccatttgccgccagcaagtgagaaagtgttacctgttcagctatatggattaagtggtcagaggcgcggagatatatctgttatcgggaatcctgcgattgatcggatcagacgtttgggagtacagcttccagctaaggtcatggattttctgagtgttgcattagcagtaactgcagcagatactttcgttcagcgtgaaagttccgaggatggttggacccgccaattgtcgttacgactcccccttcatgaaccatccagatggattagtctaaagaaagaacttgagagtgctttgcattttcttagtggagacatctgggatttcgaattttgtgacgatggttatgcaccgccagagccttatagccagcattcaaggcatcgtctgattaagctaaaagggcttgactgtgtcagcttattttcaggaggtctggattcagctattggtgcaatagatcttctggctgcagggcgcgctccacttttggttagtcatgcttataaaggggataagtctcgtcaagatcagattgctgaaaaattaagtggccaattttcgcgctttgagattaatgctgacccacacatttatcaaggcgtgactgatattacgatgcgaactcgtagcctcaattttcttgcccttgcggccgtaggtgcttgtgccgtacaagagatatctcaacaagaaaagattgatttgttcgtacctgaaaatggatttatctcattaaatgcaccacttactccacggcggataggttcgctgagcacacgaacaacacatccacattttattacgagcatacaaaagatctttgatgcgctcggtatttcttgtcaaataatcaatccatatcagtttaagacaaaaggaaaaatgatctccgaatgttcaaataagcagctcttatctaaaattgtggaaagtacagtatcctgcagtcattggaaacgaatggggcagcaatgtggggtatgtataccgtgtatcattcgacgagcatcacttcatgcagggggaattagtagagatgttgaatatattttccagtccttagctaaagtaatgaatgaaatagatcgcagggacgacctgatcgcccttaggattgcgatcacgcagaaatcgactttgaaaataggtacatggattgccaaaagtggccctttgcctacggcagaatttgataatttcaagcaagtatttaaggatggcctagatgaggttgaaagctatttactgagtgagaacatagtatgagcatcgatatgcactgtcatctagacttatatcctcggccagacctcgtggctgaagaaagtaaacgtcgagggacttatattctgtcggtgacaacaacacctaaagcatggcatggtacttctttattggctaaagaaagtcaacgaatccgaactgctcttgggctacatcctcaaatcgcgcatcaaagatcgcatgagttagacctgtttgattcattgctttcggaaactaagtatgtaggggaaatagggcttgatggtggacagggatttaaagaacattgggatattcaattgaaagtgttccgacacattctcaacagtgtaaatcgggctggtggcaagattatgactatccatagtcggggaagtgcatcagcggtgcttgatgagattgaaaatatcgatggggtggcaatattgcattggttcactggaacacctaagcagcttgaaagggcaattgatttaggatgctggttctcagtggggcctgctatgctcgatacaataaagggtaaggccttagttttgaaaatacccaaatcacgcattcttacagaaacagatgggccatttgctaagtttcgtaatgacccactaatgccatgggatagtgggattgcagagaaacagttagccgcattatgggggattagtcagatggaggttaatgctcagctagttgataattttaaggtattatgtacatcataagaatgaaaaacttagatatgcatttacagttcaattcatttttcgtcatcagttaattacacataaaattaaaagtaagaatatatctaccctgtgaatgagcaaggcggatttatatagtttgtaattagtttaaatgtaagcagttcgtcagagtgcgtattccgctctattcgatcacggattggccgttatgaccc

SEQ ID NO: 32 - DNA, 5408 bp, Escherichia coli
gaaattatttggaatggatgatggcgcttgattactggaacaggtctatgacatgaaggttatgatttgttcactgctatgaggttaacactttaacaatttcccttactattcttgtactaattccttccaaatacttctgcttgagattaggatttatcctcttgtagtgttatttacaataaagattgtgatgctgatttaacccaacgtgttgtcagttgccttgctgaactaagttcagtatctagaaattagctcttgatacatgagcgaatcagcgaaaattttcatcccgaccaattaatgaccgtaatggataggatgttgctgctatttggcttccatgagggaacatatgtttttaaacgatcaagaaacgtccactgacctgctgtactacaccgctatcgccagcacagtggttaggcttgttgatgaaacgtcagatgcacccattacgattggtgtgcatggtgattggggggcgggaaaatcaagcgtactaaaaatgcttgaggctgcctgcgagaaaaaggataaaacgcactgtatctggtttaacggatggacgtttgagggattcgaagatgctaaaactgtaatcatcgaaaccatcgtcgaggatcttgttgcctcgcgcccgatgagcaccaaggtggcagaagcagcaaaaaaggttcttcgtcgaattgactggttgaaaatggccaagaaagcggggggactggcgtttaccgcatttactggcatacccacatttgatcagattaaggggatgtacgaactggcatccgactttctaagtgctccgcaggacaagctttctgctgcagatttcaaagcgtttgctgaaaaagcaggaggcttcatcaaagaggccgatactgatagtaatacgctacccaaacatattcatgctttccgtgaggagttcagggcgctgcttgatgctgctgaaattgaaaagctagtggtgatcgttgacgatcttgatcgctgcctgcctaaaaccgcgattgaaacgctcgaagctattcgccttttcttgtttgtagagaaaactgcatttgttatcggtgcagatgaagccatgatcgaatatgcggtaaaagaccatttccccgacctgcctcaaagcaccgggccggtaagttatgcacgcaactatcttgaaaagctcatacaggttccatttcgaatccccgcactgggaactgcagaaacgcgtatatataccacgttgttgcttgcagaaaatgcgttgggttcggaggacgacaattttaaagcattgctcaataaagcacgggaagagatgaagcgtccttggatcagccgcgggcttgacagagaggcagtgatggcagcgttaaatggaaagattccggaggttgtggaaaacgcgctgctattcagcctacacgttacccctatgcttagttcggggacacatggtaatccaaggcagattaaacgctttttgaactcaatgatgttacgccaggcgattgctgatgaacgcgggttcggtagtgacattaagcgtcctgtactggcaaaaattatgcttgctgagcgtttttaccccagcgtatacggaaagcttgttcagcttgtatctaatcatccagagggaaaaccggaagctttggcggagtttgaagccttggtcagaggggggaaaactgctccgaagagtcgcgctgacagcaaagagaattcctcagagtctgaagacgtccaaaactggctgaagattgattgggcgatcggttgggcaaaagcagagcccgcactttctggagaggatcttcgtccatatgtgtttgtcactcgtgacaaacacagtactttgagtaatctggtcgtatcaagccatctcattcctataatggagaaacttcttggtccgaaaattgggatggtgaaaatcaaaggggatttagagaaactgagtccaccggatgctgatgaattattcgaaatgcttagcgataagcttttccaagaagacagtttcaatcgaaaaccaagaggatttgacggcctcgaatatctcgtagaaacacaacctcaccttcaaaggagattgattgattttgcacggcgcattcctgtaaaaaaagcagggggatggcttgctacccgtattgcgcaaagcctagtggaccctacgttaatagaagaatatacaaaactgatccaagaatgggcgagtcaggacgaaaatctgtccctctctaaatcagcaaaagcaaccctccagttatcgggatatcaacattaatgggaacctcaaaagcttacggggggcctgttcatggcctaatccccgatttcgtggagaatccatctccaccgaccctgccgcctgttgaccctgcggatgatagcacgctggatacgccgctcattccaccggattcgagtggctcagggccacttagcacaccgaaagcaaactttactcgatactcccgttcaggaagtcgtagttctctgggtaaggcggtcgctggatatgtccgcaatggagtggggggcgcaggcagggccagccgccgtatgggggcctcacgcgctgcagcagggggactgctcggtctcatcagcgactatcagcagggaggtgctactcaggctcttgagcgcttcaatcttggtaatttggcagggcagtctgcatcgactgctcttctctcccttgttgaatttttatgccctccaggtggttctgttgacgagggggttgcgcggcaggctatgctagagaccatcgccgatatgtctgatgtaggagaggagaattttgatgagctcactcccgatcaattaaaagaagtctttattggtttcgtggttcactccattgaagggaggctcatggcggatattggtaaaaatgggatcaagttaccagacgacatagacgctatcgtcagtatccaggaggacctgcatgattttgttgatggagctactcgtacacagctccgtgaggagctgaggaatcttacagggctttcaggggatgctatagacagaaaagtggaggagatttacaccgtggcatttgaattacttgcccgagaaggggagagattggaatgagccatcataccttagttgcccgtttgggcactgacgataactccgatttacagctcagccgccaaagcacgcatctgacagaaattaattttctcaaagagaacggtaaactggatttcggtctcgggcaggcgctgaatggtttgagtgatcttggtttaacgccaatggatgtctccgtggatctggcactactggccgcaacggtgactgcggcggacacccgaatctcacgtgggcataacgctcaagatctgtggacgcgcgaaattgcactttatatcccggtagcttccccgacattatggaatagtcagactggattgctcagcaggatgttgaattttcttaccggcgaccgttggacaattcatttccgctcgcgccctgttattgagcacgggctcattcagcgatcctctaaggaacgttcggtgaaccctacttctgtttgcttgttttccggggggctcgacagcttcatcggtgccattgatttattatctaatgggggaaccccccttctgatcagccactactgggatacgactaccagcgtttatcagcagaagtgtgctcagctgctgtcggagcgatatggacaatcgttcagccatgtgcgagctcgtgttgggtttgaaaaaacaacgattgagggagaagatggagaaaacacccttcgtggccgctctttcatgtttttctcgctcgcgacaatggccgcagacgccctcggcgggccggtcacgataaacgtccctgaaaatggtttgatctctctcaacgttcccctcgatccgcttcgtgtcggagcgctaagtactcggacaacccatccgttttacatggcgcgttttaatgagctgctgggcaaccttggcatcagtgcacatctggaaaatccctacgcctacaaaaccaaaggtgagatggctatccattgccatgaccatgcttttctaaggcaacacgcggctgacaccatgtcatgttcgtctccgcaaagtacgcgttggaaccctgcgctgaatgagcagcaatcaacacactgtggccgatgtgttccatgcttaatcaggcgagcatcattgtttacagctttcggcacggacgatacgatttaccgtatcccggatctccgtagccgggtactggacagctctaagcctgaaggtgaacacgttcgggcatttcaatttgctctggcaagattggcgcgatcaccgagtcgagcaaaatttgatattcacaaaccagggccgctcagcgactatcccgactgcttagctgagtatgaaggtgtttatctgagaggaatgaaagaagttgaacgcctgctgagtggagtcataacgaggccccttacatgaaattagcaggacagaagcccgctccacaatgggtcgattttcactgtcatctggatctataccccaatcactctgcactcatccgtgaatgtgacatttcacgtgttgccacgctagcggtgacgacaacccccaaggcatggatgcgtaaccgggagttaacttccgattctccttatgttcgtgtcgcacttggtctacatccccagctgattgcggaacgtgagcatgagatagcgttactggagcactatctcccttctgcacgttacgttggggagatagggcttgatgccagcccgcgcttttatcgcagctttgaagcacaggagcggattttttcccgtattctgaatgcctgtttcgagcagggggataagattctcagcatccacagcgttcgcgctgcagccaaagtgttgggacatttggaaaacaccagacttactgaaaattgcaaggctgtcctacactggttcactgggagtatctccgaggctcgacgagctgttgaacttggatgctatttctctattaatgaagagatgctacgttctcctaaacatcgaaagctggtgtcctttttgcctttcgaacgtatcttgacggagaccgatggaccttttgtgtttcacgaagaaaaagcgatacaccctcgtgatgtgcagcgtacggttcatgaaatcgcgcagatccaccacgtatcggacacagatgctgctatgagaatactttataatcttcgaagtttagtcaccaatagttctcacagtgagaatagttcatgaatctaattagttggattaatacaggggaatagttgaatacttcagtcccctaaaagctaatatgctctatgtcatctaatgataagtggctccaaagagccacttatcattaacttttctaaagggaggtagaagt

SEQ ID NO: 33 - DNA, 3678 bp, Escherichia coli
ttaatgcaaacgcatcaggaagggcagacctagtcacatgtagaatacgatagcaataaaaaagtctaattagaatgcaaattgatgcaactctatgccctccaagaactccaaacctgaaagatttatgtaaaacatagtgttcgtttcaccaaaatacatataaactacattaaaatagaaatttgtctcacctataagccatttagacaacagattaatgaggtttgtatcacaaatgaccacaaacgagatactttcgcagcttatcagtcttggactcaaaggggataaagttgcttttgttcggcaggcttcgaaactcgcgcgttcctatgattctatggggctgcctgagcttgcttcagccattagaggtagtattcaagataaaaacacgtttaacttgcagaaagtatcacgcagtacatcacctatttttgaacgtcttgatacattacctgtagataaagaaactaaatttgatttagcagacgtaactcaaccgtcttctgaaattcaactcccattgttgaaagatagcactctgaaaaaaattaaagaatttttgactttcactgaacgagctaaagaattaaaggatgccggtcttggcgtgacatcctctatgattttatatgggccaccaggttgtggtaaaaccttgacatcaaaatatattgcatcctgtctaaatttaccgcttcttactgcaagatgtgactccttagtctcatcatatctggggtctacttctaaaaatatcaggcagctatttgagtatgcaagtaaagcaccatgtgttttatttctagatgaactagattctctagcaaaggctagagatgatcagcatgagttaggtgaactgaagagggtggtggtttctttattgcaaaatattgacaatctacctgaagaaacaatattgattgctgcaagtaatcatgaaaatcttctagatagcgcagtttggaggcgctttgagtatagaatatctattggattgcctgattttgaagtcagaaaacaactatttgaacaatattcaaacataaaagctacatatgacgattttgttgatgaccttgcggaaatatcatcagggctaaactgctcatttatagaacaatgctgcttaagatctgagcgacatgctctggtttacaataataaacaaatcgatacccgatttttagtcgaggctatcttagaagcgaagggagttacatttgatgaagaagataatttacttataaagattgtgaccactctcagagaatacaatcccaaaagatttacaatacgaaagatagcaaaaatactagggctttcaaatgctaaagtgtcaaggctaactaagaactatagagagatattatgagtaacaaagaaagaccaataaaaataattgaggcgacacctcaagattttactgaaaaaacatataatttcggaaagaaacaacctatccgaacagtaacaactagtctaaaaaatagactcaaacaagaagtcgatgacgttaaaaattttttccagagctcatttaaaaaatggcccaatataccggcggtggctagagttactcttcatgaaaaagctcttgctaagtcacatcgcccatcaagcctattaggtgataatacatgtcccgtaataggcagtgataattttggagaattacttataagtgttactgaaaaagggttagcacaacttcgcaaaaaaattgaaaatagcactaattctcataatgggacagtacatattgctgtaattgaaaagatcgaaccttttagtcttaaccatgatgttatagataaaaataaatcagatagttttcttctgaaactctttgaccataaagatagaacaactaaccgcagtatcgacaaagaattaatggaatttgcagatgaactaggaatacaaaaacccaaaaagtatgatatcagttcagatttgagtatatatgaagtaaaagggaatgataacatcgcccaactggcaagttttattggcatacgaaaattagaacctatgccaacatttggtcttactcatacagtatcgcaatatattcctgctgaaactctagacctagatgattttcccttacctcaagaggataaacattatccactactcggaattatagatagcggagtcgatcccaataacaacatacttaggccatggatttgggatagtttagatttagtaaaaggagaacacgactattctcatgggaacatggttgcaagtttagcaattaatggaagatggttgaataactatgctggttttcctcaatgccaagctgaaattgttgatgttgcagcctttcccaaagatggtacgctcaaattgccacaattaatgaaagctatccgagaggctgtgaccacctatccagaagtacgtgtatggaatctgtcattaggttgtcaatccccatgttctgaagacagcttctctgaattggggcattttttaaatgcacttcatgatgagcatgattgtcttttcgtcgtagcatccggcaactacatttatgatcctcaacgaacctggcctcctcaagaattaggtgggcatgacagaatatcagcccccgcagattctgttcgttcattaactgttggctcagttgcccatttagaatcgtctgactctgtggtcaaaagatttgaaccttcatctttttctagaagaggtcccggcccagcctttatacccaaaccagagataaatcactttggaggtaattgtgacagtaaattaaactgtgaacataccggaatcatagctattggcgaggacaatgctctttgcgaaagtattggcacaagtttatcagcaccgttaatctcaagtttagcggcatcactgtggcatgaactagatgttaatggttctatttcaccatcgcctgaacgtatcaaggcactattaattcattctgcgttaaaaaactcaccagccaaaacggagcattatgcgtttaattatcaaggatttggacgcccaagcgatcatataaatgatattattggttgcaataaaaatgagattacatttctatttgaaatagatacccgagaaggtattgaattcagtagaacgccatttgtaataccacagtcattacgtactgaggatggaaaattcacaggtgaaattattatgacactcgtttattctccaccgcttgattatgactacccatctgaatattgccgttctaatgtggatgtgtcattcgggacttacacttatgatccagttaacgctaaatggatacatagcggaaaaattccacaaataaaagaaaagagtgaattatttgaaaaggtactgatagaaaatggcttcaaatggtctccagtcaaagtttatagaaaacaatttccgcaaggtataaatggggagcaatggagacttaaacttgatgttcagagacgagcagagcaagagcctctatcttcacctcaacgtgctgtattggctattacgttaagatctcttgccaattctactacagtctacaacgaagccgaggttgaaataaataatcttggttggaaagaaactgatattgttgttcgtgaacaaccaaaaatcaggattcgtcaaaaataagcattatggtcaccttttataggtgaccattta

SEQ ID NO: 34 - DNA, 3676 bp, Escherichia coli
atagaacgatgaaggatggaagctacatattctcggtactaagatttatttttctgacacaaaatgaccatttggcgttacataatcccaaaaaaacgtatcaaaaatctcaaaatgcgttacgattagagagtattttgattctgcgtgctcattttttgattgctgtggctttttgttgtgggagtgttgaatggattatttatcagaagtgttaaaaatcattgaaggtgcaacaaaggcaaatgcttcgatggctagtaattatgctgggttgctggcagataagctcgaacaaaaaggggaggtcaagcaagccagaatgataagagaaaggttgcttagagctccccaggcgttggcaggagctcaaagggctggaggtgggatatctctgggctcattaccggtagatattgatagtcgactcaacactgttgatgtcagttatcctaaattagacagttcagagatttttctgcctgcagcaatcagtacccgtgttgaagagtttatcactaatgttcaacgttatgatgagtttgttaaagctgatgcagcattgccgagtcgtatgctcgtgtatggaaagccaggaacaggtaagactatgttatctaagtacatcgctacccgcttagattttccacttcttacagtgcgttgcgatactttgattagtagtttattgggacaaaccagcaaaaatcttagacaggttttcgattatgtaatgcagaggccatcagtgctttttttagacgaatttgatgctttagctggagcaagaggtaatgagagagatataggtgagcttcagcgagttgtcatttcactattgcagaatatggatgcggcatcagaggatacggtaattattgcctcaactaaccatgagcaacttctggatcctgcaatctggaggcgatttagcttcagaattccaatgcctctgcctgacatacatcagagagagttaatttggaaaaatcgtttaaagaatatgatatgtagcgatctagatttaagtgatttatcaagaaaatcggaaggattatccggagcaataattgaacaggtgagcttggatgcacgtagggatgcagttattgaaggtgcaagtgtgataaatcaccataaattgtataggcgtttgtatcttgctcaatcgcttatggaaggtgtaaatttaagcacttacgaagatgaaattcgttggttacgttctaaagataaaaaattattttctatcagagttcttgctaatttgtacaaacttacatcaagagtaatttcaaacattctgaaggagtcaggagcatatgagcagaaggggtacacagtttagtaacgcaaaagttacaaacccaatgttaagaatccctttttccagtagtgacttgggtgcaatagtaaacgctggcggtggggcaaaggtattggttgatgtaacagccgaatatagacaagggctagtaagaaatttaacaaccagtaaacattatttagaatccaaactttcagagtaccctggaagcttgggtactttggttttcaaattaagagaccagggaatagccaaaacgcataggccgaacaaaattgctcaagaggctggattgcaaaatgccggtcatgccaaaatagatgaaatgttggttgctgctcatgccggctgttttgacgtattagagtcagtcattttacatcggaatattaaagcgattttggctaatctaagcgcgattgagcgcattgaaccttgggatgagaataggaaggttccaggaggcactgatggtttgtttgaatcatcaaacatccttgtacgactatttgagtacacaggtgaagatgcaacttacaacaactatgaaaacgttatttctatattagaacaacacggagttaaatatgatgagattagacaaaaatgtggtcttcccttattaaggataatggatttatccccaaatgatagatatatattagacattctcattgattacccgggtataagaacgttaattcctgaaccaaaatattcagcattcccggttagtgtaagtgattctgttggcattgaaacaaatagctttcccgtaccatcagaagaattacccattgttgctgtatttgacactggggtaagccccatcgcggcaacaattactccttgggtagtgagtagggaaacatacgtaattcctcctgatacgagttatgaacatgggactatggtgtcttcattgatatcaggcgctcattttttaaatgacaatcatccatggattcctgatacaaaatctaaaatccatgatgtttgtgccttagatgaaaatggatcttatatatcagatttaattctgaggctagcagatgctgtaaataaaagaccagatataaaagtctggaatttgtctttgggaggcggaccatgtaatgagcagacgtttagtgattttgcgatggagttagatcggctcagcgataaatttggtattttgtttgtagttgctgcaggtaattatgtagatgaacctatacgtacatggccaaatcctgatccgcttggaggtgctgatttaatttcctctcctggagagtcagtccgagcactaacagttggttcagtttctcatatggaagctaatgatgctttaagtgaaattggaacaccgacaccatatactcgtcgtggccctgggcctgtatttactccaaagccagatataatccatgctggcggtggggttcatagaccttggaatgtaggagcaagcagtttaaaggtcgtagggccagataataggctttgctctaattttggtactagttttgctgctccaattgtggcaagtttagctgcgcatacatggcagagaatagccactaatacagactttaatgtttcaccatcattgattaaagcattattaattcattccgctcaattatcttctcctgattactcgccaagtgaaagacgctatttgggagcgggaattcctaatgaagttattgagaccttatatgatagtgatgataggtttactctgattttccaaacattcttggttcctggggtgaggtggagaaaggataactatcccataccatcggcacttattcaaaatggaaaatttaaaggtgagattgtaattactgctgcatatgcaccaccactgaaccctaatgccggcagtgaatatgttcgcgcgaacgtagagctaagttttggcttaattgagaataatactataaaaggaaaagtgcctatggaaggagaaaacggtcaatctggatatgagagagctcaaattgagcatggtggaaagtggtcaccagtaaaaattcatcgcaaggcatttaataaaggaattacttcgggtaactgggctcttcaggctaaaacaacgttgagagcgaatgaaccggccttaatggagcctttacctgtaactattgtagtaactttaaaatcattagatggaaacacacaagtttatgctgatggcgtaagagctttaaatgctaataactgggctcactatccattgcctgctcgtgtgccagtttccgtataacaactatataaatcaaacccgctgtagcgggtttgatttatttgtgggtgtgttttataaaaataccgcccatacacaacaaaatacaa

SEQ ID NO: 35 - DNA, 3917 bp, Escherichia coli
gggacactcaggttacataacaatgagtgatacagttcacgtagtgaaggtactatgcctaggtgtttgattacactttgatcattgatgatacgctcatgaaggtattactttcctgtaatgagcaggtaggtaacgatgtcgaactaaatgaatttatagtaaactttgcaacaagagaacaagggagtatgaggggttatggctactgcagagcagatcaaagctttattgaaaagccacgttgatcgtgatgatcagcgtttcttttctattgctttgcaggtggcagctaaggaagcaaggcaaggtcatcataagcttgctaatgatataaaaaacttagttgataaaaatcagaaaacaacgagttctgtaggtttagttgaaaaacgacttacaccatttgttaagcagcctgatggtgatcttaaggggttacttgagcaaacgaacaagccagtacatcttcaagatctggtgatttctggaagcgttagggaaagattgaatcaggttctgcttgaacaaaaacagaaagataaactttctgagtttgggcttattccaagaagaaaaattcttttcactggtcctcccggtactggtaagacaatgtccgcatcagtcattgctacagagttaaagctaccactttatacagtcgtcttagataatctaatcactcgctatatgggtgaaactgcagctaagctgcgtttaatttttgaccacatacggcaaacaagagctgtatatttttttgacgagttcgatgctataggaactcagcgtggcgctcagaatgacgttggagaaattcgtagggtcttaaattcttttttaatgtttgtagagcaggatgattctgagagcatagttttagctgcaaccaatcatccagagcttttagatcgcgccttatatagacgatttgacgatattataccgttcacaaggcctgaggataatctaatcaggaatcttattgaacagagactcgctgtctttgacctcggtaatttattttggagtgagatcattgatagtgcttcaggtctaagtgcagcggagatcacgcgagcaagtgaagatgctgccaaagaatcagtgctttataatgcaaacaatattacaaccgatttgttagtaaaggctataaagcgtaggcaagaaagtagacaataagggatgaaatgactaccaacaagaggcatattttattaaacggctatgtttcccccgaaaactatcgctctaggagcaatggtcgtagtccccaagtcccagctcgtgatcgagcggtacatggtatatcattactaaatcagtatagccgtatattgaatcattatgatgaaagaccgaggcttccccctgttactgatgaaaaagggatttatgttaggctaatcagttttgaacaatgcgatcttcctatagataaaatcgataatacttatttcaagctttgttctttagttaaatcaaataatcgtgaaactgcgattatatacattaatgaaaatgacagaactaaattcactaaaaaaataaatgactatttgaatccatcgaaggatggtatcgagttccctagaaatcatttgttaattgatagcatacaaaatatcgagttagcagatataacttctttctggacagataaaaaagatcttattccggatgatcacggtgttgaaaagtggtttgagctttggcttaagggtaataaggaggatgtgctaaatattgctcggcgtttatgcgaaagaattaatggaaggctcgggaatacttctattaattttttcgatactactgttgttcttatccgtacgagtctatcgagattaaaagtttgtcctgaattaatatctaatttaaaagagataagatcagcgagggatgatatatcagttatagttaattccttacctacagaacagcatcagtgggcagaaaatgttgctgcaagaattacgcgtaacaatgaagctgatgtttctgtttgtatattagatacaggtgttaactacaataatccactattatctagatttactaactcatcactggcagctgcttgggacatatcttggccacttttcgatgattataatcaaaggccttataatgaccacggttccagacaagcaggactatgtgtttatggagatttcctgtctgttttattgaacgatcaggacatttcgattccgtacaatatcgaatcaggaaggatactacctccaagagctactaatgatcctaatctttatggagctattactacaggaacgtcaagtcgtctggagctggaaaacccgaactggcgcagagtttattcgcttgctgtgacagcagagcctaatactcttggaggccaaccgtcctcatggtctgcagagattgacaagtttagttttggtttagaggatgatatccgcagattatttataatttctgcgggtaactctcaacctacaaatttagaattagattattgggattcagtgactcttgctgaaattgaagatcctgctcaatcttggaatgcattaactgtaggggcgtatactgataaaacaacccatacagaccgcgaatatgatggttggtctcctttcgctatgtcagaagatattgcaccgtcatctcggtcatcggtatcctggggatggaaaaagcatgccccatataagccagatttagtagaggaaggcggaaacaaacttatatcacctagccgtgatgaaatcacaaatacaattgaattatctttgctcacaacctctggcagggcaacaaatcaattgtttgaagttaattcagatactagcgcagcctgtgctctagtatcaaaacatgctgctatgctaatggctcagtacccagaatattggcctgaaactattaggggattacttgttcatacagcaagatggactagtcgtatgcacgaacgatatagaacagaacgtgcacaggggacaccaaaatcggctaaagaaagcttattaaggatggttggttatggagtacctaatttaaatcgagcaatgcatagtgcggaaaatgcacttacattaatatctcagtcggaaatcaccccatttaaaagagatggttctactgatcctacattgaatgaaatgcatctgttttcactcccttggcccgtagaagctcttcgcttactaccaccagaaacaaatgttattttaagaatcacattgtcgtattttattgaacctaatccaagtcaaaaaggattcagacgacaatattcgtatcaatctcatggattgagatttgcagttattagacctaatcagacccttgaaaatttccgtgcttcgataaaccgtaatgcgaataatgaagaatacaatggacctgaaggagatgcgtcaggatggtttctggggcctcaactcagagttagaggttcattacactcagatgcttggaaaggcagtgctgcagatttaacagagatgaatactatcgctgtctatcctgttggtggatggtggaaatatcgtactgcgcaggatcgctatattaacaatgttaaatatagtttattggttagcatagatgtaccagatgagaacattgatatttacagtgagattcaaaacattattcaaattgataatcaaatagatattgaacattaaggttttatgcctaaggtttaatgagtttgaaatgaaaaatcctttactaattggctgggtcgatgataaagacctggccatctttttatacggaaatgatttatgttttattttactaaatttatattagaaccatcgtgcagattgtgataattccttcatactgattttttacctattatagttgatttttgttgcttgatatctctctttaatacaacggcgtagtac

SEQ ID NO: 36 - DNA, 5958 bp, Escherichia coli
cggattgaatctgtttatgaaatttggctgctatcaactaatgggcgttaagttgattgtatgatctgattgataaagaaggggagactaaaaatctcctcttctttgcagcagtttactgcggtctttttgtgatgcatcagcataaaacgttttacttgtggaccctaagaaatggagaacattatgtcgactgtagatacctctacagcagaggaactcaatcaaggaggctcagattttattctgacttccctcgaggctatgcgtaagaagttattggaccttacgtctcgaaatcgacttttgaatttccctatcactcaaaaagggtcttcactacgtattgttgatgaattaccagaacagctttatgaaaccctttgctcggaaatcccgatggaatttgctcctgtgcccgatccaactagagcgcagctgttagagcatggctatctcaaagttgggccagatggtaaagatatacagttaagagctcatcctagcgctaaggattgggcgcacgtcttaggaatccgtacagattttgatttaccagatagccataaaacggttgtttctgattcagatagagagttgctggaaaaagcccatcagtttatcttgcaatatgcccaaggccagaatggaaaattaacagggattcgttctgaatacgttaatcaaggtatagctttgtcagcgttgaaggaggcgtgctgcttagcaggctatgaagggcttgaggattttgaacgacaggcaaaggctgggaatgagattagtatatcttcttccaatccctctcatgacgataatcggatacaggctctgctttatccaaatgaactggaagcttgtttgcgcgccatctatggtaaggctcaaactgctttggaggagagtggcgccaacatcttgtatttggcgttagggttccttgagtggtatgaaagcgattcctctgaaaaggcacgttatgcaccgttatttacaattccggtgagatgtgaacgaggaaaattagatccgaaggatggtctttacaagtttcaactttattacacgggtgaagatattttgcccaatctctctttgaaggaaaaacttcaggctgactttggcctcgctcttcctttgttcaatgaagaggaaactccagagtcttattttgcttcggtgaagaaggttgtagagcagcacaaacctaaatggtctgtgaaacgttatggtgcacttagcttgctcaattttggcaagatgatgatgtatcttgacctcgatcctgcccgctggccttgtgacaagcgcaatatattgtctcatgaagtaattcgtcgctttttcaccagtcagagctgtggtcaagagaattccggcttacctggtggcttcggtcagcatgagtactgcatcgatagttaccctgatattcatgacaaggttccactaatcgatgatgcggatagctcgcagcacagtgcgttgatcgatgctatccgtggtcaaaacttagtcattgagggccctcctggtagtggcaaatcacaaacgatcaccaacttgattgcagcagctctgctcaacggtaagaaagtcctgtttgtggcagagaagatggctgcactggaggttgtcaaacgtcgcttggatcgtgcggggctaggtcaattttgcttagagttgcacagtcataaaactcataagcgcaaggtgctggatgatattaatgctcgcttggtgagtcaggcgaccatgcctactatggaagagattgatgctcagattttgcgttatgaagatcttaagcagcagctcaatgaatatgccgcattgatcaataaccaatgggcgcaaacaggcaaaacgatccatcagattttgagtggtgcaacccgttatcgtcacaaattagatattgatgcaacagcacttcatatcgaaaacctttccgggaagcagttggataaagtgacccaattacggctgcgtgaccaaatagtagaatttagccgcatctacaaagaggttcgtgagcaggtgggggctaatgcagaaatatatgagcacccttggagcggtgtgaataacacacaaattcaattgtttgacagcgctcgtatagtcgatttgctacaaacttggcagacatcaattatcgactttcaacatagctatcaagaatatgtagataagtgggcgttagaaggcgaaagccttaatacgcttcaatatattgagcaattggtagaagatcagtcgaatcttccagtgttgtgtggttcagagcatttcccagcacttagtgagctagattcacccgatgccattgcacgggtgcgtcactatttagataggttcgagttgctacaaggtcattatgtggccttgagccaggttatcgagcctcaaaagctacgacttttagaacaaggacaatcgtgtgactttcctcgtgaagagctggaaaaatatggtgcagcagaggatttcactttacgtgatttggtcaggtggcttgaatccatccaatcaattcatgatgagttatcatctatttatgcgcaattaaacgatttcaaaaatgctttgccagatggtattgcttcgtatatcgatgattcgcaagctggattgctattctgctctgagttgttgtcgattctgggtgctttaccgactgagcttattagagttcgagatcctctttttgatgatgatgatatcgatgcagtattgcgcgacttaatgtgtcaaatcgaaacattgcgtcctttaagagatggtctatctactttgtatcaattggaccagttgccttcccaagagatgctcgcgcatgccgttgctgttatccagcaagggggattatttgcatggtttaagagtgattggcgtagtgccaaggcactgctcatggcgcaatctcgaaagcctgacactaagtttgctgagttaaaacgctgctcagctgatttgctcaagtattcggagctgttacaacggtttgaacaaagtgactttggtaatcaacttggtaatgcattccgagggttggacaccgactgtgaacaactcatgttattgcgtgattggtacaagaaggtccgagcttgttacgggataggttttggaaagcgagttgcgataggctctggattatttaacctagatggtgagattatcaaaggtgtgcatttaatcgagaaatcgcagattagctcaagattaatgactttggttaaacgggtcgagcacgaggctaagttattaccgcgtatttctagcttgttggaagaacatgcatcttggttaggtgagcaaggtgtattgatgcaatcttaccgacaggtgcggaatactctcattgccttgcagggatggtttatcaatccagatatatcattagagcagatgactcattcctccgagattttgcaaaacataaacgatcttcagatatcccttgaaaatgactcgttacagttaggggcgtttttacaattaaccccattggcttgcggtgcgtataaaaataatcaactgacgttagacactattaacgacacgctgaattttgccgagcaactggttgataagataaattgcgtatccttggctacccagatcagacatttggctagtggtagtgattacgatttactatgtcgtgatggtggagaaatagtttcgaaatggaatgaacagattaaaaatgctgagttatatgcgctagaaacaaagttagagcggagtcagtggctcaagtcgactgatggttctcttaatacattaatcgagcgcaacgaaagagcaatacagcaaccccgttggttgaacgggtgggttaactttattcgttgttacgagcagatgcatgaaaatggattgcagcgaatctggagtgctgtacttgcgggctcgctcccgattgaaaaagttgaattgggtttagcattagcaattcatgaccagctggcgcgggaggttattcacatccaccctgaattgatgagagtttccggctcacagcgcaatgctttgcagaagtcatttaaagagtacgacaaaaaactgattgaattacaacgtcagcggattgcagcaaaaattgcttgccgaaatataccagaagggaattctggtggtaagaaaagtgaatatacagaactagctttgatcaaaaatgagttgggtaaaaaaaccagacatattccaattaggcaattggttaaccgtgcatgtaatgcgctggttgcaattaaaccttgtttcatgatggggccaatgtcagcagctcattacctagaacctggacgaatggaatttgatctggtggtgatggacgaagcgtctcaggtgaagccagaggatgcattgggtgtcatcgcgaggggcaagcaactagtggtcgttggtgacccgaaacagctaccaccaaccagtttctttgatcgaagtgccgacggagaagatgacgatgatgccgcggctttaagtgatactgacagcattttggatgctgctttgccactgtttcctatgagacgtttgcgttggcactatcgttcacgacatgaaaagttgattgcatactctaaccgccatttttataacagtgatttggtgatattcccttccccaaatgctgagtctccagagtatgggattaaatttacctatgtgtcaaaaggtcggttctccaatcaacacaatattgaagaagcccaagcagttgctgaggccgtacttcatcatgcgcatcaccggccgggtgagtcactcggggtagtggccatgagttccaagcaacgcgatcaaattgagcgcgctatcgatgaattgcgccgaaatcgccctgaatttaacgatgcaatcgatggcttacatgccatggaagagccactttttgtgaaaaaccttgagaacgttcaaggggatgagcgtgatgtaatctttatttcctttacctatggaccttctgagcatggtggaaaggtttatcaacgctttggacctatcaattccgatgttggctggcgtcgcttgaatgtgcttttcactcgatcaaaaaaacggatgcatgtgtttagttcaatgcgttctgaagatgtattgacgagtgaaaccagtaaacttggtgttatttcgttgaaaggttttttacagtttgccgaaagtggcaaactagattccctcacaacgcataccggcagggctccagatagtgactttgaggttgctgtaatggaagcactcaatcacgctgggtttgagtgtgaacctcaggtaggggttgcaggattctttattgatctagctgtgaaagatccaggttgtcctggccgttatttaatgggcatagagtgtgatggtgcggcttatcactcagctaaatctgctcgtgatcgtgaccgtttgcgtcaagaggttctggagcgtttgggttggagaattagccgcatttggtccactgattggttcagtaatcctgatgaggttctatctccgattatccgtaaactccatgagcttaaaacattggctccagacgttgttgtaccttcctatgaatatgtcgaaacgattgagtcaagcgctgaagtggcgtctgactcaattgattctcttatgcccaatttggggcttaaggagcaacttaagtattttgccacacatgtcattgaggttgagcttcctaatgttgatgctgatcgtcgtttgttgcggcccgcaatgcttgaggctttgctggaacatcagcctttatcacgttccgagtttgttgaacgaatacctcattatctgcggcaagcaacagatgtatacgaagcacaacgctttcttgaccgagtcttggcattaattgatggcgcagaggctgaagcgaatgatgcagcgtttgagtctgaattggcataattagttaaaggtaataagaacagtgacaactgtcgg

SEQ ID NO: 37 - DNA, 6502 bp, Citrobacter braakii
gctatcctacctcagattactgggctgacctaatctatagatcaggttctctttatactttatgttagcgaaatactaagatgcttcttagtgacgacctcttgacggtagaggacgcgtgcatagattttacaatcactgcctttcgccccctaacctaatccgcgaatgatgcatcctgaacttgcgcgccagttcttatactcgccgtcagagcaatcaaattgctgatgctttctgcctgttcaaggcatctcctgtcgtcagcaatactgtgcatatttgattgatttcctcttaaggagaattagtttcatgggtattaaagcgcaggtgagtatcgcgcacaagctggggttcacatcacaccaaaatgcagttccgctgttacgtgagcttatcttgcataatgagtccgaagagacatttcaggatctgacactgcatctgaggaccgtgccagctgtgctcgaagaaaaaaaatggaatatcgatcgcctgcttcccggtacttcacttgatatcagagatcgggatatcaaacttaatgctgaatggctagccgaactgactgaaagcgtactctgcgaagtcacgctaagtttgcgccagggtgaggaagaactcttcattacccattacccgcttgaggcactggcgaaaaatgaatggggcggcagtgcaatgattgaattgctcccttcatttattattcctaatgatccggctgtggatcgtgtactcaaggcaacctctgatgtccttcgccgtgcaggcaaggatgacgctcttaatggttatgaaagcaagtcgagaactcgtgtctgggaaattgcctcagctctctggactgctgtttgcaacctcaatatcagttatgcccttcccccagccagttttgaacgcaatggccagaaaattcgcactccaggagccattctggaaggaaaagtcgcgacctgtctggatacaacattattatttgcttcagcactggaacagattggtctgaattcactgctaatgctcagtgaaggtcatgcgtttgctggtgtctggttacaaccgcaggaattttcgcagctagtgacagatgacgtctctgcggtgcgcaaacgtgtcgacctgaaagaaatggtcgtatttgagacaactctcgcgaccagagctcacccgccttcatttactcaggcatctgatgaagcgttaaagcatcttaacgaggatgtttttcacgcagccattgattcccgtcgcgcgcgtatgcagaaaattcggccactggctctggggggcactcgccttgaagaccagtcggatgcctgcgaggttattttgcatgggtttgaggaagccccctatatccccgatgttgatattgatatcgagacaactggcgaaaaagaagccggggggcggctggtacagtggcaacgaaaacttctggacttaaccacccgtaaccgcctgttacacctgtctgaaagcgctaaaggcattcgtttgatctgtgcgaatccgggccatcttgaagataaactggctgaaggcaaacgcattcgcattgtcccgctccctgatctcgaaagcggcggccgcgatgccgaactttatcagcagctcacaaatgagaacctgcaggaagaatacgctcagattgcgctggaacgcggtgaagtcgtctcctcaatggaaaaataccgcctcgagtcatccctgatcgacctctatcgaaaatcgaaaagtgatctcgaggaaggtggtgccaacactcttttcctcgctgttggcttccttaaatggaaaaaatctgctgatgaccccaaaagttactctgctccactgatactgctgccgattcaacttgaccgtaaaagtgcactttcgggcgtgaccatgcgtttgctggaagaagagccccgcttcaaccttacactgcttgagctgctgcataatgactttgctctgacaatcaacggcctcgatggtgatctacccaccgatgaaagtggtgttgatgtggatggtatctggaatatggtacggcgtgctgtacgcgacatacccggtttcgaagtcacccgcgatgtcgtgattggcacattctcttttgccaaatatctgatgtggaaagatctcatcgaccgggcacctcagctgatgcaaagtgcgctggtaaagtatcttatcgaacgcggccaggaaaatgccgttctggataagagcggagaagtcatcaacgctcatgaactcgatgacaacatcaatacgcaggatcttttcttgccgttgcctgcagattcctcgcaaatcgccgctgttgtagcctctgcaaaaggcagggattttgttctggatggcccacccggtaccggtaagtcgcaaaccatagccaatatgatcgcgcataaccttgcgctaggcaggcgcgtactttttgtcgctgaaaagaaagcggcgctggatgtggtctatcgtaggcttgaggcccagggactcggtgaattttgtctggaactgcactcgagcaaaacgtccaagatggattttctgaaacagctcgagcgggcatgggatgcgcgtgatctactaaccaccgaggagtggaaggaagaagcggccaaggtgcagcacctgcgtgacaaactcaatgaggttgtccgtttgctccatcggcgctggcccaatggcttaacactccatcaggcaatgggcacagttatcagggatgcaagtagcgccacgccgcactttagctggcctgcatcgactttgcattcttctgcagagatgacacagttcagagagatagtaaaacgtctggagctgaaccgtgatgcatggaaacagcacggcgatcattttgaactcatcgcgcaggctgactggaccaatggatggcagtcctctctcattgctgcagcaaactcattgcctgcaaccatcgatcaccttgaagacgcgaccgaggcgttactgaaggcgacgggagttactctgctctctaccgagccggagagactgtcgcagttaacttcattctgtgaattattgtcggaagcttacggcattgatctgagtttcatgttcgcaccggatgccgcaagccgtatagagtcagcgaataaagccgttcacctcctgaaagagattgaagcgacaaaggctaatctgtcagttacctacccttgtaacagttggcagcacgttaatgtcccacagatcagaaacgcacttgacgtcgctgacaaaaaattctggttctttgcgaccagtgcccgcaagaaagtcattggtgaagttatccgacaacactcgctaacgtcagcccccgacttatccgttgatctccccattgctgaaactctgcagacattgctgcaacgtctgaccgagcttaactctgctactgtatctctgccgggatgggttggactggataccaacgttgcacagttgcagaccaccctgcaacttgccgaatctatccgcaattcgcttggtggtttcgcttcttcgccacagcagttggccgagatccgcactgcggtaaaaaacctgattgttgatgccaatgaccttctcggttcgcagggcgttatctccgcactaacccggaaactgcgcacagcgatcgccgatttcaatgatgcacaggttagcttctgcaatctgataaaaccatctgaggataaaccatcgctcccggcactgcgtgactgcgcactcaatatcctgcaacatcagtccgctcttaaagcctggagtgactggagccgtgtgcgtgaggaagcgatttcacatggcctgcaaccagtgatcaacgcgctggtccatcttgactcaggagacatcagcgcggcagagatttttgaaactgcctattgccgctggtttgcatcgtggatgatcgattcagagccgctgctgcacaattttgtgccggctgagcacatgagtgatattgaggcttaccgtacgcaaaccgatcgtctgtccaaactggcagtacgctacatccgtgcccgtttatgtggcgtcattcctgcaaaaaatgaggtcagcaagcagggtggttttgctctgcttaaacatgaactacagaaatcccgtcgtcataaaccggtacgtcagatggcagcagaaatgggagatgccatggccaaacttgccccctgcatgcttatgagtccgctttcagtcgcccagttcctgccctcggaccaggacttgtttgaccttgtgattttcgatgaagcatcgcagattgccccgtgggatgctatcggcaccatggcgcgtggcaaacaggtggtaatcgctggcgatccccgccaaatgccgcctaccagcttttttaatcgtgcagccaatgacactgacgatgatactgaagaagatatggaaagcattctggatgagtgtcttgctgccggcctgtataaccacagcctgagctggcattaccggagccgtcatgaaagcctgattaccttctccaaccatcgctactatgacagtagcctgattacgttccccgcttcggaaacaaagcaaagtgctgtccagtggtgcaaggttgcaggcgtctactctaaagggaaaggacgtcataatcaggccgaggcagaagcgatcgtcgctgaaacggtgaagcgactgactgataaagagttcgttgcatcaggcagatcgataggcattatcacgctgaataccgaacagcaaaagctagtcagcgatctgctggaccgtgccagacagcaacaccctgaaattgaacccttcttccagtctgaactggaagaacctgttgtggttaaaaacctcgaaacggttcagggggatgaacgcgatttgatcatactctgcatcgggtacggcccgactgaaccgggcgcaaatacaatgtcgatgaattttggaccgcttaatcgcgagggaggctggcgccgactgaatgttgccgtcacacgtgcgcggcaggaaatgatggtcttcagctcgttcgatccttcctttatcgaccttaatcggaccaacgcccgcgcggttgctgacctcaaacactttattgagtttgcccagcgcggccctgtagctcttgcccaggcagtacgtgggtctgtaggcggttatgactcaccgtttgaagaggcagtggcaaatggcctgagaagaaaaggctggcatgttgtcccgcaaattggcgtatcccgtttccgtattgatttggggatcgttcatccggataagcctggcgactatcttgtcggtgttgaatgtgacggcgccacttaccatagcgcagcaacagcacgcgatcgcgataaagtccggagctccatcctgcagggcctgggctggaaattactgcgcctctggtcaacagaatggtggattgataaagaaggcgcactcgacaggctggatgcagcaataagtcgcctgctggaggactccagagcagcggaagccgcactgattgctgaagcagaaaaacaaaagcagattacgccagtcatcgctcccgtaaccaatgatgtcagtgatgacatactggtttctgaaactacacctgtcgctaatgatgcggaaatatccgcgtcagtaacccctgtcatcccgcttactgccaaagtaagcgaagatgatggtaacactgggctgaggtatgcatctttagcttctcagaataacgacaagccagtgaatgtcggtaagtatgtcgttaacgatcttcaggaatggtgcgacaggacagatgcagaacaattctatatcgctgaatatgatgagacacttaaaaccctcattgaagcggtggtgacaagtgaatcaccggtcctggatacaacgcttgtgcaacgcatcgcacgtatacacggcttcactcgcgccggcagactgatacgtgaacgcgtaatggaaattgtggatcaacactatcaccttgcaaccgatcactcaggtgaagacttcgtctggctgtccgcagcgcaacgtgctgactggaatgtgtttcgtttgccagccacggataacgacattcgtcaggttgacgcgatccccagtgaggaattacgcgcactggcgctgagtattgaaggtgacaataagatacaggaaatgacccgctcgcttggcattaaacgcctgactagtcaggcaaaaaaaaggattgaatcagtacttgatgttgtttgaaggtcaaccgtgtggaaaacctcttttagagactaacagtctgaaatatagagtcttattcgatcatcttgagaccgaatgtattagagtcgatttctgacacctcttatcgtggttttctgcatcaccaacatcgaccagttgggcgtaatcaaggaggacgtctggaaaacgaatctatggtcactcccgtttttgcaacaccgattttgacaataagttggtttgcttgaatctattcggcatcagaatggaattttttttccacgcctcgatgagttccgcgcctgatgaa

SEQ ID NO: 38 - DNA, 10581 bp, Pectobacterium wasabiae
aatcccaccctgacaaaaggcctgaaaaggtcttttgtcatttcttcacagttagagccctatcgagacgcgcaaggaagagtcgcgccagcctgtttttacgctagcgctctgctagtgacagccagctcacagggagtgagctggcagtgtttaacgtcctaccgaggggcgtaaattgcacacagaggttaatgatggctaaagcgcactccacgccgctcaacgatattgcgattatcgctgcgaatttaaaagaccgttataaaaatggcttccctgttctgaaagaaattgtgcaaaacgcagatgacgcacaagcgtcatcattaatctttggctggagccctggtattgctggggcagatcaccctttattgggcgatcccgcgcttttctttatcaataatgcgccgctgacactcgaagatgtagaggggatcctctccattggcattggcactaaaccgggtgatgaaaatgcggtggggaaatttgggctcggtatgaaaagcctgttccatctcggtgaagtatttttttaccagtcctttgactggcatactgcttcggccaaatcagacgtttttaacccctgggacagttacagatcttcttgggccgaggtgagcgagcaggataaagttcgtattgaggatgaagtccgcgcaattacccaaaatgcgtgtgatgattatttcgttgtctgggttccgctgcgttcagagagtatctatcaggcgcgccaggatgatgaaaactttattattgtcggcgaagactatcgttatgaggtgcctgattttatttcagacccgggactcggggataagctcgccagcctgttaccgctgatgaaaaccttgcaggacattgagctggtcgtgaaaacagggcaggggtatcagcgtcaaatacatatctcgctgcctgaaaaggcaactcgcccacaatttaccaatcttaatggtgctggggaatggcaaggccacattaccgttcagcgtgctggattgccggaccctcagcaaaaattctacgtcgggcatgaggttttgctgaatgctcctgagttttctgccctgaaatcacaacgcgcctggccattcagttattcacgagaaggtaagaagactgcggataaagcgctgcctcatgccgctgtggtgatgctggcggagaaagtaccagaaggagaggcaacgctggcggtggaatgggcggtgtttttacctttgggtgagcaggacaccgcgcagcatgcgcagaaacaaacattctctatttctggtcagtactcgtatcaaattattctgcacggttactttttcatcgatgccgggcgagtgggtatccaggggctggctacactcaccagcgccacgccgttattcaatgccccagattctccaggccaggaacaactggttcaggaatggaaccgctgtcttgctactcagggaacgttgccgctattaccgaaagcgcttgcctctcttatgtcgcttattcacgccagggatgcggaaaaagcggcaatttcggatggtgtgcgtagagctttacgcaacaataatgcctggttccactgggtaacgttgtaccatctgtgggtatgcgaactaacgcgggatggaagtcagtggtgtttagttgatgcgaacactcccgttcgtcgattgcctgccacaccttcaggtgaagcgcatcgcccctgggaagtgctgcccgctctggaaagtctgggtgtaacgcaccgatttatcgatgaaacgcagcagaatatctacaacgaatttaaaagtaagtggcagttgtcggagattcaggtgttgctgcatagcgtacccgaaatggtgttcactagcttaaagcttacaaattatctcaatcaattgctgaaagaactgccgattcagtcagacagctttgtgcttgacctgattgcattgctcagaaaaacgttatttagcgtgccgctggttgagctctcacgtaaccaggcggcgatcggagaattgatggcgttcattcgtccgacctggcgttacaggattgccattgaccgtcaggagcaggccctgtgggaaacgcttgggcgtaccgctatggataggttgttggttcctgcttttctcgataacagtaaagaacctgccagcgcatctctgaattgggagacggttggcagcctgctgcaagcgatgcagaaacaggcttctgccagcgataactttgaaaaattggtgcgggattttattggcaagctctcatctcccgatcgtcaggagctataccgtcggtttgataccttgaaggtctttaaggtttcacagccaacggggatatcttacctggagacgcgctgtcacttgcttgaactaaaacaaaagcgaaggatattcaaacttggcgggagcgctaattttggtatgggtttaagcgcattgttgcagcaggcattgcttgaaaaagaaatcgtattgatcaccaatgatattaaccagaccttatttggtggttctgaatattcagaagcaaaggagtgtgacagcgaaggggttatccatctgcttgagcttcaccctcgtctggattcgccgacaaaacgtatcgatttactcaataaaatggctgcggacggggacaaatttagcgccggagatcggcttgtctatcgctatctgatgcacggtaattcggatgatactggtgaagctgaattgtggaaggcgggtaaagcgcatcccgtatgggcaaaaattctttctgatgccgattcggagcaggtcaagtggactattatttcgccagaaattgagcagaatcttggactgactcccggattcgagaaggcgcttaggcttgatagtgtaacgccggatcatgtgatccaccgcttcaaagaaagccttgaatatctggagtttgatgacttatctgcagaagatgcggaagaagttctgatgcacattggccgctctatgggcgaaacaatgtggcggcagatggctcttcatcgtagggaaggcaaagaggggtatatatcccttgatgatcgttgtttcttgcgtggggggcgcattgaactgcccactgaattgaatgacaacgtgacgttcatccaacccgccagtcagccagagatgcaggatcagcagcgcaaatatctgacaatggtgaacgccgaacatgcggtcatgctggctttatccgggccgaacccggaacgttactgcgactttatcctgcaattgttaatgcaaccgacgaatgatttgtcttcagagagagcattcaataacctgcgccgccaaaaatggctattgcaccgcggtgtggcgatggcaccagaaaatattctggatattagcgcggcagactatccggagatcgcgaagctgacagaagcgacgccgctcatcgctctgcttgaggatattgctctcccagatgaggctaactgtgcgctgagttcattggtcgtgcgaggcaaggctgcgttttacaaggcgctcactgtagcaggtacacttccactttatgcaatcggtagcagcttacgtctcactgatacgattattcttcaggccagtgacaggtcgtacgcgtttgagagctttgacggttggttgctcttaattgagtgtctcaaaggtgctgagtcgcttgagggtaatgaggctatcaatgcgctgagtttttcgcatccggttacagacaagatagttgctagctaccggcatctcgttgacagcatgaatccaacccaaagtggtgaattgcgtaaagcactgttaagcacgctgtgtcatacccattcagatcccgccagcgtactgcgttcaatcccgctcagaacggctgctgatacctgggcgttagccaccaatctctgttatggcgtaacgggagcagaacgtagtgctgtcctacatgacgacgactgggcgtatttgtccccttggctgcaggctaatgacttgtcggtagacagtactgagtccgaagggcatctcagtcatgttgagcattctgccaatgtcttaagggaatactttgcgccctgggaacgctgggttccacgtaaggcaattgctgcactgctggctttgctggcggggaatcgtaaggttcataagctatgtgagagctacctggggttgcaaagttatgccctgttcgtgaatgaactgtcgcaagacagcaaacccttaactaaccatgacgctcactttgcagagttaacgctcttacagtgcattgagaaatatgcctttgccgtgaaggtttacgaagaaaacacgttgcaggttcattctctgttccaggaacgtttgaccgtggcgctggcaactgacctggatacgatctttgtgggtcagcacggctacgctttttataccggtcaggcaccgcaaatcttcattcgccgattttccccagaccagtatacgcctcagcaacttttggcgattctgaaacgcagcaccagctggctgcaggaaggtatttatctgcagaaggcaaggctagacacgctctggcaatcctttgagcaggccgagcagttggatgtgaatatcgcgcgcgtcactatcctgaacagcattgttgagcgcctgaaaacactgggccttaaaaactctcagcttaacgttttaatgagagcctatgagagtgagcttcactctcttgctgaaagtagtgacggcaagttgctccacagctcgaggctcactgaaattgtctatgacattgcaaatgctatccaggatcgccctgaactgcaggctgaaatattaacggcggtcagaaagcgtatagaggatgctcagtatcagccatcaagcgttccttttgagctgttccagaatgccgatgatgcagtagaagagttgttcaagctggatagcgatgcccgtcatgagcgggtacaccagaaatttatggtgaaagagcaaaacggcggattgtcattcttcaactgggggagagaaattaaccgctttcagagcgtgaaaaatgagcaagtcgagaatgtacatgatggctacaaaaacgatctgaaaaaaatgctggcgctttaccagtcggataaagagcagggcgttaccggcaagttcggtctcggcttcaaaagctgtctgctggtgtctgatcatccttacctattgtcggggcggctggcgactaaaatagcgggtggaattgtgcccgaatcctgtgatgctgaaagttataaacaactaaaccaactcactgaaagtgccgcgacaaatggcctgtcacctactcttgtgtatttgccactgcgccagcatatgcaagcggaagtggtgttaaaagattttactctgtatgcaggtttgctaagtctttatgcacgtaacttgtgccagattgtcattgatgagcatgaatggcgctgggagcctgttcagtatgcacgtattcctggtctgtcattgggcaaggttatgctgcctaacggcaagggtgctcagtcgccagtgcgggtggtggtttaccagactgaaatcgatgatgagcgctgccatctggttttccaggtcacgcgtaggggcctgagaagttttgatactcatattccgcgattgtggaacttgtcgccattgatgagtgatacccggcagggctttttgattaacgctggatttgaggttgatattggtcgacgccagttggctattgaagctgaccgtaatcggggcattatccagaaagcgggagcaaaagttcattcgctgctggaattactttggtgggaaacggagcataactgggaggagctggttgttgagtgggaactgagccctgaattgacccatactcagttctgggaaagcttctgggacgtgatgtctacaggcattagtaacgatattaacgcgatggaaaacgaaaaattgctacagcagctttacgaaagcgaaaatggcatcatgagcttctatcgctcatatcccgcgctgcctaacggatttaaagagcaggctgccggactgataacgtggagcgacagagtgcgtagcgcggatgaactggtttctcgtctggcgagttcactgattcatctccctgcgtttcaggcattgcacagtgcacagtgcctggtggcagacacgacgggaagcaaacttaaagtcgaaagtaaactgtcgcttgaatcattaataagctcgtcgttgccggataaacagggtgttgatatccagcatctgtcaccgcgggatgctgaaaagctggcagtcgtatttaacgaagagttcgacaagcgactgggtgaactgacaggctggcaggacaaaattgaggctttcagaaaacagctgataaacctgcatgtgcaaacacaagcaggctctacacgcccgattagccaaattttgctcggtaacactccttgtgccgaaaaaaatgaacggatgatctctgggtttgcacctaccgatgccatcatttcatcatcatattctaagcaggcctgtgaatttattgtttattgcaaacgcagaagtcagggatatgtttttgaggatttagtcaaatgggcaaagcgcaaaggcctggcggctgataatcaaaagcggcaggcattttgtcgttttctgattgaaggactggaaggggagaaactggcgggtatgctgatggaagagataccaccggactggttgcttgaacttaagctgcgcccaggcgccttcccggcagactggcactggagcaataatgatattgcctctctcctgcaggggcggttactgactaacattgacagaacaaaggcatgggagcgcgagattcgggagacaccggaagaatacgaaccgttggtgacaccaggtgaagccgtacaaaaaatacacacctggtgggagaggaaccagcaggaagagttggtgaaatacaatgctcggctctaccctgaaggctggtttgactgggaagctttaagaaatgcctctgacgatcagcgttcacgcctggcgttattgaaactcctgtatctaggctcatgccagaccattgggcggactcaggaagagcaacacagtgccgcaattgagtattttgaggacaaaggctggtgggaaacctttatcaaccctgatgcagcgcagcaatggctggatgtgatggacaattatctggaggattctttgtacggagatacctaccgtatctggctgcaaatattgcctctgtatcgtttttcaaagcatttagattcctatcgcaaactactggatatgtcggaagcgttccttgaggatattggggatttgctgcgaccggcatccagtttcaatctttcgggaacgggcgtgggaactgtagtcccggagttacgtgcaactctgggtactggggtgaacttcatcttccgtgaattggtgcgtaataacgtatttatcgattccagcattcatcgatattgtttctctgcgccggaacgcgtcaggcgtctgttactggcgatggagttcgacgaaatggatgttaagcaatccactgccagtgactcgcttctgctgtggacgtttttccgcgaacatctcggtgaggaagatgcgacctttaatcattgtttcgacataccgctgcgcattttaaccagcgaagggaaacgctcacttcgtattgagatatttggacaggatcccctggattacgtatgaaaatgatctttcagcagggccagcaggtacgacatgaacgctttgggctggggacgattgaactcttgcgggaaaacactgcactcattcgtttcgagtcgagttttgaagaacgtccactttccgaactggagccggtgcgcagtgctcaggatgctttggcagaaggaaattatgacgatctgcgtgaagttctggcgcgcagtcaggcgcttgcgatccgctccatcaatgatagttggggggtgttctctacttcacgtatcaacctgctgccgcatcagttatgggtatgtcaccgcgtgttacggcaatggccggtacaaaagctgattgctgatgacgtagggttggggaaaaccgttgaggcggggctaatcctttggccgctgctggctaaaaagcgtgtgcagcgtctgttggttttagcgcctgcatcgttagtaccgcagtggcaggagcgtttgcggcagatgtttgatattcgtttgtccctctactccgcggaaattgatactgagcgatcagattactggaatacgcatccctgggtggtcgcttcattgccgacactgcgaaaagatattaatggcaggcacgagcgaatgctcaaagcagacgactgggacttgctgatcatcgatgaagcacatcaccttaactcgctagaagattcgggggcgactcagggctatcgatttgtgcagaagcttatcgatcacggaaagttcgcctcacggctttttttcacagctaccccccatcgcgggaaaaattacggcttctttgctctgttgaggcttttacgtccagacttatttgacgtgaataagccatttgaaactcagcagcatcatgttcgggatgttgtgattcgcaataataagcaaaccgtcacgaatatggacggtgagcgtttgttcaagaccgtcaacgtgacctcacagacctatcatttttctgaggctgaacagtcattctatgaccggctcacacgatttattctttcagggcaggcctacgcttcgtcgctaagctctgcaaaccagcaggccgtgcaactggtgttaacggcaatacagaaactggcggcaagttcggtagcggcaatttatgccgcaataaatgggcgtatcgccaggctcggggaaaatcagaaaaagctgcaggcgctgaatgatgaaatgaatgccatcatgagtgattctcaggccccggatctcgatgatgcctacattgcgcttgaaagcgaatatgttgaaatgtctgcttcggttcaacttatgcaaaatgagctgcccatgcttgaagagctgcaggcgcttgcggggaatgtggaatcggaaacgaaaatccagaccttgcttcatgtgctggaaaacacgtttcttaatcgcaccgtcgtattctttactgaatataaagcgacacaggccctgctaattaatactctgaatgctcgctttggctatggttgcgtcagctttatcaatggcgaaggacgcctggaagggatttacaataaacagggcgtcaaaacgtcatggagtatggatcgctaccatgctgcggagcaatttaaaagcgggcaggtacgctttattgtttgtactgaagccggtggtgaaggtattgatttgcaggacaactgttattccatgattcatgttgatctgccgtggaatccgatgcgtcttcaccagcgtgtagggcgactcaaccgctatggtcaaaaaaatcaggttgaagttattactttacgcaaccccgatactgtagagtccagaatatgggacttgttaaacagcaaaataaccacagtcatgcgttctttgggcgacgcgatggaggaaccggaagatctgttgcagcttattcttgggatgagtgataaagtttttttcaattcactttttgctgatggcctgacacaaaagccagaaactctaaatacgtggttcgattctagagcagggaccttcggtggtcagtcagccgtcagcgtggttaaaggtcttgtaggccatgcggataagttcgagtatcagaacttagatgaggttccgaagcttgatcttatccatatgtatggtttcctcgagaacatgctgaaattgaatggacaccgtctggacaatgataagggtgttcttagctttgtcactcccaaagactggatcacacagtttggtatcaagaagaaatataacaatatgacttttgaacgtgttcctacagagaaatcgttagaagtgcttgggatagggcatgtgattattaataatgctattaatcaggctgagaaatttaacgcctctacggcagtagcaaggggtatttcctcagctttactgatttacacattgagagaccagattactggcgatagtaatgtacaatcattttcagttgttggagtggtactggaagataatattcaaattttggtcaacgctgagttagtcaataaactggcttttatatatgacaacctacctaaaggttcgacggtgattaagcttgacagtgcattccatgttaattttgagagggatataaagcgtgctgaggccgcattagatctctttattcctgggttgaatttaccctatgagcaagtagtatggcaacatacagcaacttttttgccacagtaaatatagcagtgttcaggatagcattgggaatgagaaaaactatatgaaaatatggtgctgataaagtattagtactatggtcgaacggctatgcgcttatgtcatggagctgattccagagagccttgaaaacgaaagatttaattttccccccagcgtcatccgctctggcaggtgagtcgcccgagtccgagtgcccagcattttcaaatcaccat

SEQ ID NO: 39 - DNA, 10687 bp, Vibrio harveyi
tgagaacttacacaattaacgccaattttcttattccatcacgcatacgataaccgtgatcaactttttctttttgcagcaccctataatgcaaccagtttaatttctttggatgcgtaatagtcagtgtgctgctcttgataaacagtagtcaataggcatagtccatatccgaaatctaacttttattaacgtacaaatagcaaaagaataaataacttagagcataggtcctcgaaaaatttttctaatgttcgatagtcttgcttttggcgtaatgtggtaagtccaataggtgataatgtgtatagttgcattgacctagtcttgtgagattgcatttaggatctccatcatcaattcatctttcgattcaatttcaaaaaaggttctaaaatggcgggtgcttcaatagacgctattggtgtgattaaccaaatcaaagacaacttaacagaccgatacgaggatggctttcctgtccttaaagagatcattcaaaatgctgacgatgcgggtgcgaacgaattaactattggttggagtaaaggtttctgcaatgcagaaaatgaactactcaatgcgccagcgctgttttttatcaatgatgcaccactggcagaggaacaccgtgatgccattttatcgatagcgcagagctcgaaagctacatctaaggcatcagttggaaagtttggtttgggaatgaaaagtttgtttcatatgggtgaggcattcttctttatgtccgatcaatggcgaattgagcattgggcgtcagatgttttcaatccatgggataagtatcgtgatgcatggaatgaattcggtgaaaatgacaaatgccagatcgcaacaaagttaaaagggtttttaagtaccgataagccttggtttgttgtttgggtcccgttgcgtacaaaagcgctagctaaagcacacaataactacattatcatcaacaactttagtggtgatgaaaaactccctagtttctttaatcaggctcacttatcagagaaaacttctgagattttgcctcaactcaagaatctcaaagacatcggctttttctgcgagtctgacaagggtgtgtttgatgaagtgacctccatacagttacatgaagattcgtctcgaagctctttttgcggtgaaccgcgattaaataatggagactcttttgcagtcttctcagggaaaatctattcaaattcgaatgaagagcgttgtgcactggactatgcaggatgcgagcgagtcatctttgatgagcgtttaaatcaattaaaagacgaaaatatggggtggcctaagagttatcagttcgacaagaaagcgaacttgcctgttgaggctctcgacaaagctgaacagcatgcttctgtaacattttcgcgttttaaaacaaaggggcaagcgtacctcaaagccaactgggctgttttccttcccttaagccaaaccaaggaacttgttgctgtgcctatcgagggggagtacgactacaatctctatttacacggctacttctttgttgatgctgggcgtaaggggttgcatggccacgacaatcttgggttttctacctccctagagcatgtaaaaaatgatgagaaaaagctgcgtgaggtttggaacatcattctagccagtgaggggacattcaacctcgttttaccggctctaaatgagttttgtcagaagttaaggctgccacatcaaataaaaactgttttgaccaaggctttgtacgatctcctcatagaaagatatagaaaagaagtatccaagagcgccaattggataatcaatatcgatgacaagggggctgcttggtctttacttgataagaatgcccaatgcttaccgatccctcgtccagagaatagtgattactctcgaatttggtcaacgttgcctggtttgagtaagttactggataaaaagtcactgtatgaagccacgggtaatgaatttttaaccgagcagaatcaacgtgatagttggaatattacgctcctggaagaagcgttaggaagtggtgttgtcaacgcattttacagatcaatcaatattgaatatctgcttcagttccttcaactagctaaggagcagtgcacgacggaagattttgataacctgattattccacagttccgagaggtattgtctactcataagcttgctgaactttcattgaacaaggctcttaacacgcaagtttttgagcttgttagcgcacctaaaaccgtcgtactaccaattgataaagatgatcaatctatttgggaacttgtctgcaagatcattcctgcaaagctactgctccctaaatttctgtctactcacaataagccaattcatgacaatgtcactgaagaagagctcttcgcacttttaaccctagtagatagctacatcaaaaaacagggtgaacgtttatcctctgatgaatcgtctgcctgtgagcgtctcattacatttgttattgattgtgtaaatgcaagtgaggtaatccaaaaaagcgatttttatcagaagagtgggcatttaaagcttctaaaagtggaagctcttggttcgcaacagagcacaaaatatcgctccttaaacgaactcatagtgttaaaagaaaaataccagctgtttcttcgtggaggggagcggaactttggtaaagggttggggaaagagctagttgcagtcgtgcctggcttggagctttgttttataagcaaggattttgaaattggtggcctatatgaagggcttaccgcttgttctgaagccgcgtgcctacgactgctttccacgtacccaaatcttggttcaaattcggcaagactagcgctcactaaagtattctctgccgagctctctacagatgaggagaaaagaggtttccggtatttgattcacggcagcaaagaagacgacttgagacaaacgctttggaagccaaacagggcaactaacccagtatggatgaaaatttggcgtatgtgtcagccagaagatttccctggatggtgtgagttagatgaagagttttctaatgctttgacaaaccagtacgaacattttattggcgttaaagagcagttctataaagacattatctctgaatacagaacaatactgcctgaatgcaattttgataactttgatgactgggaagtggagcaactgctcgcagatattggtagtcaaggagatgaaaggctatggaaagcgttgcctgtccataggacagctcataacactagagtcgcgattacgaccaaatgcctgatggaaggaagtgcaacagttccaagtgaatgggatgttcaccttattcaacattcagccattgctgaagtcgccgcttgccagcataaatgggtgaatcatggtctacctaaagagctgatcgagattgcgcttacccaatcaagtccagctcagtattccgcatttattttggaccagctctgcgctattcgtattgcgaatgaaggaattgagcatgagttggaaggcaagataaataataccaagtggctgcgattagcgtcaggaaccgaggtttcaccggaagctattttatctttctctgccaatgagctgcctgagtctgcaaagttctgcgagttaaaagagtcaaacatttacatgttctctcaactcgatggaaacatgtttgagcacgatcaagcacgtggtttcttgagagagtgggtcgcaaaaagtaacagctcagtttgctcgtgcattttggcagaagccgcgcaacatcaaagttatgtagttggtaatttttccaacatttctgctcaggtgctagaacagatttcatgcatcccgccattgatgcagctatctgcaggctggggcttactggttgagctctaccaaagccaatatctttcagtgaatgaaaacaagcaagtgatgctatgtaaggaaacagaaccacaatcattatggtgggcgctggagcgtattgctgatgatgatattcacggtcagtcaaaggaacttcggaaagcatttttagaagcgttgtgtaacaccgagggaggcgttgattatcttcctaaactgagatttcgcaatgagaacggaagttatgtatcgggcaacacactggtatcgaatgttgctcaggtagttgctgataacttaatttcgccacaagaatacgcagtcattgagagttattgcagtaaatctgctctcacgaatggtaatacgtcaaaaatcattgagttagcgggcgataatgcgccagtacttagtgattacttcgatgactgggaagggatggttccccctgatgccatagcgacatttatagcactgtttgctaaatctggtggcgtcgagaaattggttaacaattatctaagacagtcaacgctggagtcgataaagcaggggtatgaggaaaagtggaactccggaaagggacgtagaggcgaattttcacactatccgtatagctcgttatataaaagtgttgattttgaactggcaatttgtgcagaaaatgcggcgtacatgacgtcgattttcggcgaaagaattcaagttaaattacaaaaaacaccagattcattgcttgttcaccaagcgaacaagtccaagacgaaaaggatagagcttcgccgagttgatacaaagaatgtatcaaaagaccaacttctccgcatgcttgccaaagctgtagaaacgatttttactgatgtgtttggtgcagagtgtattcgatttgaaagtgaatttttgaagaggtttggtgcttcagaacaggtagatattcagattacccgacagatagtcttggagaatgttgtccccctacttgaaaggcttcaagtgcgagaagaaggactttgtgatttacgttcagattacaaacgtgaacagcgtgttttggcgagcagtgatccttctgtactacaagatcgctcacgccttaacagcgtccttacgaagattaaagagactcttgaaaataacgaaaaagtgcaatctttggtactcgaatctgtacgaaaagagatgagtaaacatttccaatactcgcctttcagcgtgccatttgagctgtttcaaaatgccgatgatgctttgtgtgaacttattgaaatgcagggcgactcaaccaatgtactgactcgatttgatgtggtttctggcagtgatgggactcttaacttctaccattgggggagagaggttaactactgtaaaagttcatatgtcgcaggcaaaaaccaatttgaccgcgacttagaaaagatggtgagtctcaacgtttcggataagtcagatggaaaaacaggcaagtttggactgggctttaaaagttcattgcttcttaccgacattccacgtttggtgagtggtgatatttgtgcagaaattcatgctggcgtattaccgagtgttcctagcaaaccagtgatgacggaacttaatcaaaatgtcgatgagtataaaattggaaatcgtaaaccgacattaatccagttgcctaaatgtgataagaagcgggcagatttgaagttggttttgggacgtttcaaaagtaacgctggcattctcacggttttttcacgacaaattcgagaaatcaatattgatgagcagcgatttgggtggtcgggacaggctctccataatatccctgaagtacttgtcggtgaagtgaaactgccaacaaatacttctgaagagtctaacgttatccttcgaagtaatagagtgcttattatcaataccgagtccggtcagttcctttttgctttggattctaacggagttgtttctctttcgaatcgaaaaaacctaagtagcttttgggtgttaaacccgattgacgaagatctgaaattgggtttctgcatcaacgcgccatttgcggttgatattggtcgctctcagcttgctgtagataacggagacaatatcgatctttccagttcactcggcaaagcgttatcagctgtgttggtcaaaatgtttgcagcttcttcgaataattggaatgaatttgctgaagaggttggcctgggacaaagcagcacatttatcaagttttgggcgtcactttgggatgtaataacagcccattggccagcaaggcttggagagacgaactctaaagctgaactgattaaacaaatgttcacagtggaagatggtctgcttgcgttttaccagagatgtgcggctcttcctcgaaatcttggtgtaaaggaagattctcttgttcaacttaaaaacgttgatactggagcgaataaacctttgaccaaggcatttaataccttgggaaatcacccgatacttcaacggctatataaagaccaacaactcgtcgggcatgacacctttgagtttttgaagagtatcgattttagaccgaataatggtgcgttaactaagctcgaattgatcgatttgattggacaggactttcctcacaatgaagtaaaccacgacagagcaagtttctatggtcgcctatttggtaaaaactttgaaaagttaatgtcgaattttgaaatgacagtgactgagaaaaaggtgttggaagagcgtttttctgaattgaagtttctcaacaaaaccggtgtatacgtgactgcaagcaaactgattgttgaggggagccctgagagagacttgctatccaagtttgcaccagacagcgcgaagttaagtgaaaaatatgaccaagcatcaatggacttggttagcttcattcgtcgtgacgtaagctatgacattcattcatgggctaagcaaataagatctgaagaatctaacaggggaggaaagcaggaagggttgtgtagcttccttgttgaaggcggctatttagcatcatcgcttctcagaaaactacagacggatcaccccgcgtttcttacaaagggacgttttgatccgagcgtattaacagaaaaatggcgttggagttcttcaaaggcttcggctttcattagcatttggattgatacagaggaagataaagcaaggcacgtacgacaagcgcaaaaagagtttattccgaatgtgaccaatggtgagcagatcctcgaaaacatcacgaactggtggaatcaatgtcgtaatcaaagcttaattgattatgacaaacagctctatgctcaaccaatgccttggaaggcaatgacagaggacttcgagcttgaaacgttagaggttcgtaaaggttggttgaagttgttctatttagggagttgccaaacattaggtttcaataacgatgtagctaatcggaatgttgtttcttggttcgaggacaaggggtggtgggataaactagccgttgccaatggtcctagccctgaagtatggaaagaattaatggaagaatatcttcaaacagcacgcgttgatgagcgttatagagtttggattcaagttcttcctttgtatcgctttgctactaagctcaaggactatgtcgctctcttcatgaacgcttcctttattgataatcttgatgatttgttaaaaccaaatagttcaaacaagttatcaggctctggcatccaagtatctgagttaaaaggaacgctcggtattgggattaatttcattttacgagagttgcaaaggcaccaagttttggagcgtgagtattgtgaagatatccaaaagtacgcatttgttttgcctgctcgattacgaaagttactcaaaaaaatgggagcaggtttaagctttgacgcagagccagagaattcagagcgagcttacgactatttcgtttcggcattaaatagtgaaacccaccctcttcttaaggactttgacatcccatttagagtcttgttggctgataagcaagcgtttgaacgttgttttaattttgctctagatgagcagtttgaggaagtatatggataacattatacgcgttattcacccaaaattcggtgtcggtaccgtcgaattcgaaaaagctgagacatctcttgtccgatttgaacatggttttgaggagtgtttgaaaagtgagcttgaggcggtcgctgatcttaagtccgatcttgtttctggacagagtgtcgctgcctctgaacttgcgttaaaaacattagcgcactcactaaaaagtgttaatgaaaattggagtgttttttctaaatcgaacattaatttacttcctcatcagttatgggtatgccatcgagttctaaggcaatggccaacaaatcaactgattgctgatgatgttggtttaggtaaaacgatagaggcgggcttgattttatggccccttatcgagaggaaaagagtcaagcgtcttctgattttgacgccagcacctttggttgagcagtggcaccaaagaatgcttgatatgtttgatattcgtttgagtatgtatgcaccagaaaatgatacctcgcgcgtcaattactgggactcaaacaatatggttgtcgcttctctacctacgctaaggaacgacaagaatgggcgtttagagcggatgttaaatgctgagccgtgggatatgctcattgttgatgaggcgcaccatctaaattcaacggaagataagggtggaacgttaggctttcgctttatacagacgttgattgaaaatgataagtttgaatcgaagttattttttacagcgacgccgcatcgaggaaaagaacacggattcttctccttattgcagttgctgagaccggatttgttcaacgttaagcaaatggatgagcgagaaatgcgcccatttgtgaaagatgtgttgattcgaaacaataaacaatttgttacggatatgaatggtgagaggttatttaaacctctgtctgtgtcctcaagaacttacagttacagtgaacaagagcaacatttctatgacctcttaaccaagtttattgtatcgggtcaagcgtatgcatcctctttgaattcaagggatcaaagagcggttatgttggttcttaccgcaatgcagaagctcgcttctagttcaattgcagctatcgagagagctctaaaaggacggatagagaaacataaactaggtaagcaacgtcttcaggatattgaagttcaacaggctgctttattagaaaagcgtgaggagtcagaatcgcagtctgaaagcgagatatacagtgatgaattagcgcaattagaactggaatttattgaaacgacaacgcgggttcaattgatggatgatgagctccctagaattatggagttgttgtctgcttgtcagaaagttggctctgaaacaagaattttaacaatattagatatcctagaaacggagttcaaagatagaactgtcgtcttttttactgagtataaagctacgcaagcgctattaatgggtgctttgaataaaaagtatggtgaaggctgcgttacttttattaatggtgaaaatcgtcttctgaatgtagagaatggctcaggagtatgtgttgattatgtcaccgatagatacaatgccgcgaagcgttttaatgaaggcaaagtacgatttataatttctacagaggctggtggtgaagggattgatttacaacaaaattgtttttcaatgattcatgtcgacttgccttggaacccgatgcgacttcatcaacgtgtggggaggttgaatcgatatgggcaagtcaaaaacgtagaagtaatcactcttcgaaatcctgataccgtcgagtcaagaatctgggatttgctgaatacgaagatcgatttaatcatgcgttcggttggcggtgcgatggatgagccagaaaacctaatggagttgatattaggtatggcggatagcacattgtttaatgagttgtttacagaagcagccaatcgtaaaaactctgaatctctctctgcttggtttgaccataaaacaaaaacattcggtggcgagtctgtagtgcaaaaagtgaaagacttgattggtagagcagaaaaatttgactatcaagatcttgaggctgtaccgcgtttagatcttggagatttaaaaccgttttttactcagatgctttcatttaatcaaagacgttgtaagtatgatgaaaatggtggtttatcgtttttgacacctcacgcatggttggggcaatttggaaccagacgctcgtatgagaaattgcattttgaccgcaaagctaaacagcttgattcagaagctgacatcataggctttgggcatcccatgttttcaaaagcggttaatcaaggagagcaaatccctggaagttacgcgtttcttaacggtatagagaaagatcttgtagtgtttaaggttcaagatcaggttacgggaaccgatgcatcagtaaaagtgagtattgttggactggtgctcgatgataatggcgattgtgaattggtcaaggacgaagaccttatcgggtatttaaacgagtatcttaaaatttccaatgatgttgactctaaacgtacaccagaggatttagtgtctgttattcaaactgctaatgattatctaatggagaatgtgtcatcaattggcttaccatttaggctgcctaattctgaaccattaacggtattctacaaagcaagtaactaactattattctatagctgagcattacgaaaaagttcggtagtgattctggcttaatatttgggccgaagctaagaggtcgtt

SEQ ID NO: 40 - DNA, 5918 bp, Raoultella planticola
gtcatagtcccttacggagataattcattgaaattaatatcttatacagcacatgtaaatagccgtggtgtatttttatccaatgaatcgttacaaaaataagatgcatgcccaccctgttctgtgtgaacgctacgaccagctacggatttataccaaaagtaggaattctatatgtcacgtattaccatcaacgttttatggttaaccgtaccaatagcgcggaagtgggcatgagcgaagtagcagatcaacagcaattggaaactcagccagcgggtgatgacctcctgcaaggtgtcaaacgcgttctcaggcatgccgttcaggcgtacggggatgggttaaaggtttatcaaagcctgcaaaatctcaacgaggtgattggcacggagtacggtaatcgggtcatttatgagttgattcaaaatgcgcatgatgcgcatacgtccgaagaacgtgggcggatagctgtcagcctggtgcttgaaaacctttcacggggaacgctctacatcgctaatgatgggcgagggtttcgccatcaggatgttgaagcggtcaaaaacctggcgatcagctccaaagagattggcgaaggtattggcaataaggggcttggatttcgcagtatcgaggcgctgacgcaatccgtgaggatctattctcgctcaaatacgaacggcaaggaccgatttgagggttactgtttccgtttcgcagatactgacgaaatcgcgcataatattcgcgatctcggtgttgatgacgcgatcagcaacgaagttgccaaaacgcttccccgctatcttgtgcctgttcctctagatgatcaaccggaggatgtccgcacttttgcccgcaacggtttctccaccgttatcgtggcaccgttagaaactgaagcggcagttacgcttgccagaacgcaggtgaaggagctgaccaatcgcgatgttccactgatgcttttcctcgatcgtattaccgaaatcagtatcgaaattttatccccggatgagaaagccgaaaagcgcaccatgcaacggcaggaaaaggcgctgggaagtattcctgacgcgcctgatgtcagtctctacgaagtcgatataggtcagcggaaacgctttttagtggccagaagcaatgtcgataaagcgcgcgtgcagcaagcggtgagcgatagcttattgactgcacctcagctaaagcgttggctgaactggcaagggataccggttgtttctgtcgccgttggcctgaacaaatcaacagtaacttctggaagactctacaactttttgccaatgggcactgaggccgcttcaccgatttgcggctatatcgatgcaccattttttaccgatattgacaggcgtaacacgaacatgagtttgcagctgaaccggctgttaatggaagtggctgcggaaacctgtgccgctgctgctttgtccgtcgtatcccgtgagctggatataggtgcatctgcggtttttgatctgtttgcctggacgggggaacatcgtcgcatgatgcaaacagcactggaacggaaagatacttcgctcagcaaagcccgcctgattccggtgatggctccgccaggaaaacagcaatggtcgagtcttgaagaagtcagtatctggccggaggtgaaatttgccatcctgaagccgaaagacgttgccagatacagtggcgcgcagttggtttctagcgaattgaatacgccgcgcatagtgcgtttgagggagataacaaaatttccctatatgtatcagtcattagatccttcggcgcagacactggtgaaatgggcagaagcctttgccctttcgctggtggaacggaaattctcccctgccagttggaccaaattctatgatgatttggtcaccttgtttgctgcggtaaaagtgaaactcaacacacttgagaactgcctgatcctgtatgaccgccagggcaaactccggcccgcaggcgggcataacagtaatgaacacaatggcgtttttgtacgtcggcatgtatccagaggcgacaaaaagaaagataagcgtaccgggattccgttgccgccagcgattgtttctcggcgctaccggtttctggatgaaaaaatcgtgcttagtgcggcgacgttcaatgcgtttaccgtcgccgacctgataagagagtacgatccgatcaaagccctgtcagggctgaatacggccctgagtaataaggcgacagtcagacagcgccaggatgcactattgtgggcatttgaggtctggcgcagcagtagtgtcgttgtcgatgtggagctgaaaaaagccgatctccatattcccgtgcagtcgggttggtgtgcggcaagcaaggctatgttttcatcctcctggacgccaacagggaaggttgtggaaagctatttaaccggcgcgatggggatctcgcctgactgccgtctggcagcgggtttgttattgattgagctgcaagactggccgggcgtcgtgcaaaacagcaaaaccgactggattaaattcctccgcgtgcttggcgttgcagatggattacagccggttgaatctaaggtaagagcgcgagcatatggcgatagttggaatagctttttacgcaatggcgacgagcatgaggggtttgatagcgactggagggcagaagtaaagcgggcacatataagtttctaccatcctcagacggtctatacctcggaaggaaaaacatggcgattgcccgggcaacttgagcacgcaacattgccagacgatctgagggagctgttgtgtacgctgattttcgcctttctgaagtcgcagactacggagttttttacctttgaggtcggtcgttttgagcgacagaattcgcaaacagactcccgtacgctgccaacgccgcttggcacttttttacgcactaaagcttggcttgccagcactagctcactatctgaaggattgcattttagccgtccagatgcgtgctgggcttcgcgggagcggcgcaataaacctccgcgtttcctagaccatttgattgagcacaacgttgatattattgaagagagtcaactagcggagcgcttgttttctgcgaaaattggcctacgtgattggaatcataccgggacggcgttggatcgcattaaagaactggtctacattgttccgcagttgaacgctggcgataaggcggatttacagcgggaatatcaacgaagctggcgtgatatcctcgacagcgacgaagctcttcccgacggattggacctgattgtttttcgccgtgggcagcatgaagtgctgcgcggcaacagcgatctgcctcctgcggtgattgtcaccagtattgcacaaaaaattgaagcacaaatgcttgcttctgcaggctacgcaatactcggtattggcctggatgagaccgatacactcgtctcctgcctcggtgatacgggacgattttcaccccgtaagattaatgacggcggagtgcaactttacctcgatggtaagccgttttatcccgatgagagcgatccgttgcttatctccttcgacatgaactggttaccggaaatcctggttattggtctggcgttactcggggaaaacttagagcggggcgttcacgccaccaaggttgataagcagctgcgcgcaatcagggtacgccgttgtaagaccctctcttttgccgtgcagggcgatgatgccaccccaacggagtcgttcgtcagctattcctggccccatgaaacgatgccgacgctgattattgaagaggggctggtgtttaactggcagaccttagcgaagatttcccgcaacctctcacggctggtggataaccggttacgtttcattgaaaccttacttttgcgcctcgcagttggtcgcgataatggctcgttgagtaaaccggatgacgttaccctggcttgggagatgaattgcgatgttcaaacgatccgtgatcattacgcccgactgcgcacggacatcactcatgtgatagacatgctacttcctgtggtgacgtatctcaacggtattgagcttgctcaggttctcaagcgggaatatgccttatctaggtcagtatttgatgtgcgtagttggatttcatcacatctatctgatagtgatatacctgctgaaaagctgctggacgtgtgtgaaacagcaaccgatcgggttgaactccgtaaaatgctgtcgtttgattttcagcaatttaacctggctctggaagcgttaggggaaacaccgctgtccaatgaggatgctctgcgcagattttttacggcctttgtcgggcagaggcgttcacatattatcgatcggttacgccgacactatctggcgacctttgataccggcggagatttgtcacaatacgttcagcataaatctttgggcttcatttccttcaactctgaatggattttgacacatgaaaccttggaaaaggagatggtggactcgcaggttgacacgcaacttttgagtgcgttaggaccggacaatggtgaagagctgtctgcacttaatacgttattagacgcgaatcgtaaaaatgtgcgcgaatttgccatgcaggctcagccgcgagtttccgcctggtgcagacaaaatgatgtcccggtgaatgctcactggcagtacaacgatcctcaggcgttttgccgacagctcgaaaataagggctttcttgatttccggctctttgagccggattcactaccggattactgcctgcgcgccgggctatggccaccaacgatgccgcccagcctagatcaggatgtgctgaatatcgacatgaggaaagtttcccaggaaaaagaacgcgctgagcaggcaaaacggcaacaggaacttgagcgtcgcagtatctttttttccgggcagtcgcttgatacagccagcccgctatttgccgatcaacttcgggaactggcgagtaccgatagtagttggcaggtgcgcagccagcacaagacgcaggccttgatggattttggcgtggtgacaatgcgtcaggcgagcggcggaggttgcggaaaaagaaccgggcgtgcgtatcgggagcctcgattgacacctgcacagcagcaagccatggggctggcgagcgagtggctggcttttcagtatctgcgcgatcgctttccggattatacggatgaaacttgctgggtatctggtaatcgggcttcgttttgcgggggcgaggaaggagatgattcggccgggtatgatttcatagtgaagacgccgaaagtggaatggcttttcgaagtcaaatccaccctcgaagatggtcaggagtttgaactgactgccaatgaacttcgtgtggcaagtgcggcggctaaagacgcaagccgacgttaccgaatcctctacgtcccttatgtgctttcgccggatagatggtgcgttatcgaattaccaaacccgatgggcgataaaacacgcaatcacttcagcgttgtggggcatggatctttgcgtttgcgttttcagcggcaggagaactgacagcaaccctgctcagggaaacctgagcggggtttttaaatatggcctctatggataggggacactttctgcagtaaatggataataagaaagctaacgttgaagtctgattctgccattttccacgacagctaaatgctggatcttctttttaggatcccaacatacctagcagtaggacgtaagtatgcttgagttcatctcgatatccttgtttctgaatgacaggcattactatttcgtgggtgtgaaccgatgaagggggtgatgtcattggaaaataatgaggtagtagcaaggagaagttctgctcttatcatagtgaaaaagcggtttgggaacaaatcggaactgata

SEQ ID NO: 41 - DNA, 7847 bp, Erwinia piriflorinigrans
cactcaataccacacaattctcaactccgaaggacttcgtgaaacgtgagtaagcgtcaactcagctccgtctggtttacctcgtcaggctctgtagtttaggtgttgccatggcgtataaccctgccaacagaataacttaccttactccagtcaataccgccttcgctgtacgcttacgcttttcgctcaaactgtgtgaaaacgtttttgatcgcataaattaccaaaacagggctgaaaaccgcgctcatacgtaaaattcggctcaactaaccagtcgaccaatttcagattttgcgtagacgcgcgcacttcagttttagtcagggttttcacacagcctgcgctcatggctgctttaagctaaaacaaacagatagaaagaagttacgataccctgtgaattcttgcaggcagatatcaaggagggttcattggtagcgataaaaatgtatccggcaaaggatggggatgcttttcttattatttgcgatgaggaaaaaagtgcatttctgattgacggaggctacgcggaaacgttcaggcaacatattttgcctgacttacgtgagctgagttttaacggttaccggttacgtctggtcatggcaacacatattgattcagatcacattggtggtctcgtggacttctttcttgtaaatggacacgcagcagagcctgcagtgattactgttgaccgcgtatggcacaacagcctcagggcgatgacgagacccgaaaataatgcacaaaaagtggattcccgagaaatcactgactttttgagacggagatatcatgtcgaagccgataaagccaaaccgcatgaaatcagcgcgcgtcaggggagttcactggctgccagccttctggctggcgattatcattggaatgagggaaaagggtatcagtgtatctgcaccggtacctccattcccaacttgatgtgcgataacagtctaacaattctgagcccctctaaggagagaatttcagcgctctgcctgtggtggcgcagacaacttgcatcgctgggcttttcgggacggtcctcctcgagtgaggcatttgatgatgctttcgaatttttttgtaaaagggaagcatctcaggttcctcttccgcatgtcatcaatgcaagaacaccgttgcttgagagggattatgcacgggatacctcgccaacaaatggcagttcgatagcgttcagtctggtgctcaataagaagagaatattgatgctaggagatgcctgggcggaagaagttgtgacatctctgggtgccagtggggcgtcccatcattttgatatcattaaaatctcacatcacggtagtattagaaacacaagcccgaatcttttaaagatcatagatgctcctgtgtacctgatctcaaccgacggaaaaaagcatgccagacaccctaacctggcggttctgaaagcgattgtggacagacctgcggcgtttacgcgaacgctctattttaactatgccaacagcgcatctgcttttatgaaaaattacctttctgcaagtggtgcacaattcagaatcattgaaggatcaacggattggataacactgtgagatatgctgctactgaaactgaaataaggaacgcaactgtactcattgaatgcgcgggttacactggttccggaaccctgatcgcagcagacaaggtccttacggctgcacattgtgtagtatcggatgatcctgagacaccaattacagtgacattttttggtgcggatgaagacgtctgtgtcaatgcgacaatttcagaaatagatacatcgtgcgatgcctgtctgctaacactttctgactctgtcgacattccgcctattacacttatgacacagccggagcgagagggaagccaatggaaagcctttggctatccggcatcacgcaatgggccatcacattatcttcatggcactataagtcagattttaccaaggcttttccatggcgttgatatggatttgtcggtcagtgccgattgtgttctggaagagtacagtggagtttctggtgccgccattctatcagaaaataaatgcattgcgatggtgcgcatcaggatggatggtggactaggtgcagtaagtcttgataagttaagcggtttgctgattcgaaacggcctcatcccagatgacattgcatccctgccagattcatcactgtcgggtgaagttgtcctgaaccgcacagaatttcgcgacaactttgaatcgttcgtcctggagcacaagggacgtgcagtgcttttggaaggtagtcccggctctggtaagactaccttctgccgccattatcagccccgtagtgagcaactcgcagtggcgggtgtctatgaatttacaccggaagacggtgctggtacgacattcaaaattcttcctgaggtatttgccgattggctgcataaccaggtttctatactgctttcaggtaggcctgctcgcagggaggaaacagaaaagatcaatctgacccaaaaggtgtctgaccttctacatactttctcagattactggaagcacaaaggaaaatatggcgtcattttcattgatgctgtgaatgaggcaagcgagtgcggggatgaggcagtatcgcgctttacagcattactgccggtgacacttccggagaacgtcaaacttgttttcaccgcaccatcattatcatcagctggtaaggctttccggcactggctcacacctcaggattgtatcagcctaacgcttttaagccatagggaggtgttacagctaacagctcgagagcttaaaacttccgccccttctttgtcactactcacacgagttagtgatatagctcagggccatccactttatctccgatacattcttgggtatctgaaagcgaatccggatcaggttaatctggagatattcccggttttcagtggcagcattgaaacctactacgaaaggctctggcaggggctggttaaggatgagagcgctgtaaatctgctcggtattctctcgcggatgcgctggggcattgatatttcatcactgatccctgttctaacaccgcaggaacagacggtgtttgttccaacccttgaccgtattcagcatctgcttcttaatgataaatcatcagcattgtgccaccaatcatttgcggcgtttatcaacagtaaaacggcggtaattaactcgctgctgcacggacgccttgccgacttctgccttaccagtggagagagttatggcctgattaatcgcgcttatcacctgctcctagcctctcacgacagacatcctgaagccgcattggtgtgcacgcaggaatgggctgacgcctgtatcgtcaagggggctcagccggatattctaattcacgatatccgtcagaccctgaagaacacgcttattcgtgccgatgcagtggcatcgattcgtctgttgctgcttttccaacgcatgaccttcagacaccattttttgtttctgcagtcagcttatcactcaggccttgccctggctgcacttggcagaccggatgaggcccttgagcagctcataccatctggaagcctcgttgttgatgcagttgatgcaattgtcagcgcacagactctcgcgcgtatgggaaacagtgaacacgcgctgaagctattggaaaaggtgaagtcagctgtcgaccaagaatttgaacgcaatcccgtcaatctatctgattttatcggcctttccctggcttgggtgagagctgagctgatggctggggtggttgatggccacggacgcacacgcgaggttgttgagtatttgtacggttgtgggcaagtcgttcgcgataattttgaacaatcagcgcatagtaaatcagcatatacacgcgctttttatcctcttcaggcagaaatggaagccgtgaacatagcctttaatgaccgctccgtatctttacggacggttaaagaaaagtttggtagcttaccggaaaatattcttgatctgatgctcagttcagttatgcgggcacatgacatcattctgcaacatcagttgccgatgccccagcatgctttgcaacccgtttggtacaatctggacagattacttcatactgatattccgtattcgaacgaaattcgttttaattcattaagtagccttatttttttcaatgcgccttctgctcttattatcaggatggcgggggtattttctttcgaagtagtacccgaaataacgttgctcaatgaagaaaatgagatagcagcagacagcattgacgttagtgaacagggacaactctggctggtgagcgcctaccttaatgaaacgcaaccctgtcccgatattaaacatccgagtcagggatgttctgaatggctcaagacattgactgaggctattttttggtacagcgggcaggcgcgccgggcagttattgacggcaacgatgagaaaaaagaactgcttttagtcaaggtgcagaatgatattctccctgctctttcgtactcgctggaagagcgcatggcatggccgaattcatgggcaatgcctgaacagattatccccatgatttacgaagagttagtaaacatgttcggcgcatgctggcccgataagatatcagtgatcactgatttcattctggctcatacgcctcagcaatgtggactttattccgaggggtacaggcgtttactgaacagagttattcagactcttctaaatgagcatcggtttttggggcaatctgatacgacatttcaactacttgagacgttgcatgcgtttgtttctgcttttactgagaatcggcaggagctggttcctgaattactgaatattattccagcttatattagccttgatgctcctcagctggcacaggacacttacactgagcttttaggtgtgtcgatgggccctgactggtacaaagaagaccaatttgccctcatgacaactatgctgcgcgtgataccacagcatacagacacaaatactacactttcacaagttgcaggattccttgaacatgcttcgggtgaaatgacatttaggcgttatgttaggcaggaaaaatcacagtttattggcgaacttattcgtcgtgggaattatgcacacgggtttaactattatcgtcagcagtcctgcggatcccatgaggaaatgctcacccaacttagccacccagctgcagatagccctcatccattgaaaggcatgcggttcccggggggagcgctggatgaggaacatgctgtagaatgcattgtcagtgaactgcgaaacagagtcgactggcggcttcgctggggacttcttgaaatattcagctttggcagtattggtaatcttgcagtgccctttgctgaacttatcaatgaattttctgcagacactgaagaccttaatgaaatacccaaaaggttgcacaacattttacatggtgatgtgcctttctcagaacacagaaattttatcaaaaatttcacagagcaccttgcagacaaccataagccactctttgctgaatttatcagtttgctatccgaagacactagcgataacgacgttaagcctcccccctctggtgatgctaaccagaagggtactgatacctcagatgatgtggcaatgcagccaggactttttgggaagcgttctgcgatcaatagggctgaagcctgcatggaaaatgcccgaaaagccgcagcacgcagaaacacagttcgtgcaagtgagttagccgttgaaagcctgcatataattcaggatggtgactggtcagtctggagaaagaacaaccatctggcggaacttacacggacgtacatattggacaactctgcggatgcaggttcggtcattcgtgcttatgcttcgcttgtagaaaaagaacgttatgccccggcatgggtaattgctagtcatctcatcgaaatagcagccagtaaattctctgatcaagaagcccaagctattaaccagatcgtacttgaacacaaccgccacatgcttgggaataccgaagcggatgctgcgcatttttcttttcttaatgaacctgatacctcagatgcaggtgaagaaacactctattttctgttttggctgctggaacacccactgaaattcagacgcgaacgggctctggaagtactgaagtggcttgcatcagacgatgataagattctgggccaatgcgtgacggaggcactcgtttcagacattgcctcacgagctgaagcactaatggcattgacagactgggtgtcagctagatctcctcagcgaatatgggactttatagttaaagagcgcagcctttttgaatggcttgaaggcactactgcactaagccaagtccatctcctggagcgagtaaccagcagagcgggatttgttttaagaaatgagattgccgcatttgagcgaccccgaaagcttttactgacatcagaagcctctggacaacggaatattccagaaaatttaccaacatgggtgcaatccttgtcgcagacccttgccgtgatggaaaagcagggaatagatatcccagctttgcttaccttactcgaaaaacgggttttacagcagagtggattggctgatatcacggtggcttttgagctggaaaagttacttgcgcgtggttttactgtgaatagaacaccaagtcaccatcgctgggagacgatggtgcgatttgcattaaaccagatcatacatgaggcggccgcacaggatgaactgcaaaacattgaacccttgctacgtgcctggaaccccgcgtcagaggagtgtgttgagccgtgggaggtttgtaaccgggcaaaacagattatctgcgctgttatggaaggtagacatcagcaagcttcgggcatagaggatggctttttcttgcattatcttgatgaagtggaggtttcccgagaaggtcaaacgcatctggtggaaatctcagcggtgttaacgacagctcataatggtcatgagagccttagaccaggtgcagaaagcgaatttaatgcaacacagacacctgatatagagcggacgcttagtgtgcaccttacatgccagcgagtcaaaatgcagcctttgctttttgggggagctacgcctgccgcagtgtcgaaaaagtttatgcagatgactggaacgttgccttcagactttattcgcaggcaatggcgaagcgggcgttctcttagtaaaaacagatggggggaaccaataagcagaggaagtctgttactcatgaaaagaacaactaccctccctccaggactgggcttagcgtggtatgtcactgtcgatgggaagttgatgaatatattttcatatgccccgaggaggagataatgaaatacagttcaatggaaacgccaaaaacgcgagaggaatttgaggctcgctgttttcacctgctcaatgcgatcaagttaggacggtatcatggcattccgggtgaaggtaacaaagagcaggttccttttctccctaacggacgagttgatctggcaaacattgataccatgactcgcctctcgatgaactcgttatatgatttccactataacagggataattatccgcagtttgatctctctgaaaatgacgagaatgaagaggctacggattgagctggccgatagaataatgtgcttggatcttagaggggcttccaaagaattagaacgctaaggttgccaaagttgtgtacgaaaaatgattgatttggttgaacgctaaaaagaaagtgagtagcggtttgaagccaggctacgagcttatataaacattctgc

SEQ ID NO: 42 - DNA, 7740 bp, Pectobacterium fontis
caggaagaagcattctattgacgctactatgttattagtgggcgtttgcgacagaatcaatggatagaattcacgggcgatgtagcattttagacatctaagaagcactttagtcgataatctttcacctgttcgtctgtcaacatagatgcttgtgcgtggagtagtacgcatacggccgagggctattgaccatagtgcattgtttgcttaacgttagtgcgtaggaaagaaataatctgggaaaagaattgaaaaagatagaaaatattgcaacgtcgtgttaaaggcccgttttactggtacagggaaacaggcgctaggtgctggatgataatgacaggaaatgacgatgctgaatataaggatgtatcctgcccggaatggtgatgcgtttttgctttgtgcagatagagccacattgcttattgatggcgggtatagttcaacgtttaacaactatattgtcgacgatctacggaaactggcttcagaggggcaagcccttgatctggtgattaatacgcatattgatgccgatcatattggcggcatccttcgctttctatctattaacggcgcagcggcacgtcctgaaattatccagattaaacgcatctggcataacagtttacgcagtctgacggccccgcagactgagccggttgagcttaataatgaaattattttaaacacccttactcaacgcggttatttgacccccaatgaagaggggcagggcgccaaggctatcagtgcccggcagggcaatacgctcgcctctctcattcatgacgggcaatatgactggaatgaaggcgacggattacgccgtatctcagttgagtctatgcctggaatcaacttgcctggcgggcgcgttactgtactgacaccatcgaatacggcgctggatgcactactggtgttttggcaaaagagcctgaggcgctttggatttaagggtgaggtgggggctgatacgctggctgaagatgcctttgaatgcggtgtgtcacacctgcaggaggccgtcgggaaaccaccttcgctaatttcagcaggtcgtcccaggcagcttgaagaagtttaccgacctgacacctctgtgacgaatgccagttccattgcgacgcttgttgaacttgatggttgtcgcattttaatgctggccgattcccctgcagaagacatcgttcatcagttgaaaattttgcaagctgagggctgttccctgctatttgatgcaatcaagatctcccatcatggcagttgcagtaatacaaatcctgaactgctggggcttgttgatgcaccggtgtattttatttcatccgacggcagtcgacaccagcatccagatgtggaggtgttgacggccatcgttgacaggcctgccgctttttcccgcaccctttactttaactaccgaaccccgtcttcagactacttacaacattatacgacgattactggggcaccttttaccgtagaagcaggcacgtcctgctggattgagattggaaaacgccaatgatgctggatgcggaagtcaggcttgccacctgtaggattgcttgcgggaaagatacaggaaccggctggttgatatcacaggataaagtgctgacggcgcgacactgcgttgagaatgccctttttaatcaagcgcccgtgtctctgacatttaggcaggcagacacacaggtggaactgaaggccacagtcctggatgaagatgaaaacacggacgtctgtttgctgttgcttgatgcaccgcaggatctgacccctgtacgattgagtgaaactcgcccgttgccggggagctccttttatgcctatggatggcctcagagtaaactgggcatcgggcatcgcgtggagggaacgatcgcgcagatcctcgccgagccgctgctcggaatggatatagaaatagccatagagcagaatgcggtacttccccgctatgaagggctatctggtgcggcacttatcaccggggggaactgtacggggattttgcgggtttccattgagaatacggtgggcgtcatttcagttgcagagatggcagcgtttctgcggcgtaacaacctgcttccggcacccgttacaccgacggagagttatgagaacaccagtgaggcgcagcgggttgaattccggcacagttttgagcgcgttattaccttaaaacgcgggggatatctatttctggagggcgcgcacggtataggcaaatcgacgttttgtgcaaagtttacgcctaaagacccgacgattgagcattttgggacctatagctttaacacaggccgtgacggcgtgaatgcagttcagcaggctcaacctgagaccttcgttaactggttaagtatgcaggtttccctattcctgacgcgggaacccgggcggcttatcaaaggggactactccgtactcatcaatgaagccggacaactgctgacgcgcctaggtgaagagtatgcccgccgcaacaagacaggggtgctcttcatcgatggacttgatgaggttgataagtacgatgaggccctgcttaatcggtttacagccctgttacccctgcagctcagtgaaggcttggtagtgatcttttctgccccgggctatacccgttattcagcacaactgggtgtcagggtatcgcctgcggactgctgcacactgccagctctgactcaggcatcagcgcgggaatactgcagacagtcgctcaaagaagtaccatcgcaggggatgatcagggttatctgcgatcttgcgcaggggcatcctctgtatcttcgctatctgatcgatctggccaatgcgggaaaagcagaggaagagcttgctcagttaccgctcattgacggacgtatccgaaattattatgaaatgctgtgggttagcctgcaaaacaacccgctagtggttaatcttctggcgattatcgtgcgtttacgctggggaatttcacatgcgcagctcaccgaactgctcagtcttgaagagctgagcgtcctagtcagcacacttgaacgcatcagccaccttctgatgacccctggtgagacaaccatttatcacgcctcatttgctgattttctggcagaaaaaactgtcctacgtgaagcagatattcagcagcggctgtctgcctactgtgaaagtcaccctgacactaggtatggccttctgaatcttatgtatcacagcctgcgctgcgacccgacccggcagatgtgggcaatcagccgctgcgatcagcactgggctgaccgctgtgttaccgagggggttaatccggcgttacttcttggcgatgttcgggaaacgctgaatgccgcattggcaagcggcagtctgacggataccgtacgccttcttctgttatcccaccggctgagctttcgctacaacaccctttttgcgcaatctgctttactcacagccagggcattgatccggattggccatcctcaggaagcgttgcaacacgttattcgtttcgggcggctcagtctaccagtgacgcaagccctgcaggtggcgtttgacctgattcgtgcggataacgacagcgatgctcttgcgcttctcagtctggcagatgactgggtggaggagcagctggcagaggtaaaaaccggtctttcttatccggaatttttacagctttatgatatgcgtatgaatatctactttctcaaagggctggccggagacaggcgtgcggaaggagatttaaagcaatttcagctttactggatgaacgtgattgagcaagtctgtgacgatgaggggacggtcagggggcttcgcggtcagatgtgtgcctcgttctttgcaggcatgctgtttttccatggacgttatatttcgcttgcgaaactgagtgagaatttcacggggcccctgcaggaggtcacgcaatcgttcgtgataacgttcatgtattaccattttctctgtgaggagtttcaggtcagtattgatccggagctgctggaccagctctttaaagacctgacaacgctgagctgtctggaacatgaatctcctgtgtacgtagatccccggacacttgatgctatgatctcgtctggtgcccctgcgcaaatgataagaaattttcagggggatacatcagtaccactgcaaccggtacgtttcattggtgatgataatgtgtcagcgaatgatgtgtcgttcctggaggagatggctaaacataaaattcaggcattttgcgatccatcgtatgactgtccggcgcccgttgcgctgacagcaactggctggatcgtaggcatggaggaattgtgtaggatggtggcatggtgtgagggggcggcaggacgttttcatttagagggagatgaagcagcccttgagtcggtgtggactgtcattgaaaagcaggtactgagcagcctgacatttccattatcagaccgtgtggcatggcatgatgcctatgctcttcctgaagctattgtaccacagctttatgaacggctggcactcctgatatcgtctgttttcccttcccgactggacgcgcttttggcctttattgagcagcatttcccccgtcaatttgggctgtattcggaagggttccgagccacgttactaaagattctaacactcctgagccaggtggtggatgacggtggaattcagaaccgcctttatgatctggccttccgttggtatgagtttgtgctgggcaatctgcagaatcgccatgaacttgtgccagagttgttgcacctggtttcattatttgtccggctggatgcgggtgaaagtgcacggcaggcttaccagcaggtgctggcattctcaatgggccccgactggtataaagaggatcagtttggtctgatgataacagcgctcaagtcaatgagcgaggcggacgcgatccctcagcgtttgctcgcccgtattgcctgtctgctggatatggctggcggtgagatgacctttcagcgttacgtgcgatatgcgcgccgtgatttcactgcggcgttgtgccagcacggtaatttctcccaggcagccgcgtattttatgtgtcaaacatacggtacaacagctcagctttatgctgaagctacgcatggcgacatcgatcgtgtgtcattactgaaaggaacgcgtttccccgggggcgcactagatgaacaggatgtgatcctgaacattgtgcgtttcgctgtcccgatgtgtgactgggcgttatgctgggcattgcttgagacctaccattttggcgatgcgcgtcatcttgataattatgcagatgcctatgctcaaatgatgatcaacatgcaggactgtcaggatgcaatggcgatgatcgcacaacggctcacgcttatttttgaagctgaactgatgcctgggaaccggcacctgtttatgaaatacctgcgaagcgcacttcctgaggctctcagggataaaactgattttctgaacgtttacctttcagataacaacagcgccccagcacagcagagcgagccatttgaagacgtcgcagaaacgcagcatgcaccgcctaatgtttttgcaagggcatcgcttgcgcttgatgaggctgaaagtcaattgcacagacgtaacacgtcacaggcgcagcacaaggcaatcaatgcacttgagatgtttcagcaggagggatggtcggtatggagcgacttatcagaggagcatagacgtgcaggctccatactgctgaaaagcacggattcggtgtcggaggttgtgacgctgagtagggcgttaatttctgcagagcagcatacggagagctggcgtatcgctgacaagctgattgaatggttgtctcctgcagcggatgagagtgtacaggctgagctggctgagcattcgctatcacacatggagatactaaccggcatgcctgttgccgtcatcgaacggtatgattttcttaacaggaaagaggatcagcatccgtcttctgcgcttacccgtctgcttctgcatgctgttgatcatcctgtctggatgcgcagtgagaaagctgcggatatgttgctgtggctgctgcagcatcatccccattacgtatccgacgttgggcctctggcattttcaatggtttcactgaaccatccggatgtgctgtgcgggatactcgataagctttctcaggatgatcctgggtctttatggactttgctgtcagcacatctggatgtggcagagacaaaaaaatcctgctgtcatgctggccggctcgccacattagggcgaattgcgagacgggctgcatccttggggaacgcgagtgctgctgaggcgctagcgttattgcatgacggggaagtacgccagcccttgcaggaaaaaatcgcacagcagagtccagcgtgtccaaaatgggctgagataattgcttttcagtggcgacagttagcggatgccgggctggttgacggcagcctgtcagagagggcatttgctgtgctgtgtgaggcgtgtcatcccttcgggtgggaaacagtagaggctcttgaagaacttttggcgacgggcatgagcggaagcacggcctggaacggccgatgggaggcaaaacttcgctttgccttacaggtagcacttatgtccgttctggacgatgcacagtgccttcaggctgaggctattttccgtatctgtaatcctgagccgactgacacattcagaattacgcatttttcatcgcctggtaagcaatggctcaaccagttgatgcaggggaaggttaaattttcacctattgctgacagccagctctatctcgatttttacgagaggcggaatattaacggcgtactcgttctgttgaggctgacggcttatttctaccgtgacggggtagatgctccctgcttatccggacgttttcctgcaaccgctcttgccacatctgtgcgggcaggccaactggacacatgcgtgaatgttcaagcgacgcctgcatattttggcagtttcacgccagcaattccttctcaagggctaataacgctcactagggctctttcgcatcattttaaacgagctagttggcgaaaggggcgggatgttgagagtcaggggggcgcgcctctggaagaagggtgttatttatccattaaacgggacgcgttcagactcccgccgggaataagggttgtatgggtttgtgaattcaacaacgaaccgattgcgcttatgaacgccgctggcgcactgaagattcactaggaagaatatgaatataccgttaacgcgaagtgaattcgagcaccgacttcatctgcttgagaatcattcaaaaacgggtcggctcatgctggcagagggggtatccggtgagagtttgcttaaagtcaggcgactgccaaacggccggattgattttctctccgtggatgaaactgcccgtcttcaggcgaatatgatggagtggatgaagtcgattcccctgccgaacataccgaacgatgagggcactccctaaacttaagtatcgagttaatcctagtagaaggggatgtgaaaagatacctttgaaaggtgcgaggtcaatggaacaactttcagagatttatctcttatctgaatgttcatcacggagctgcgttgtagtggccccgaaaaaactcactatagagaacggtctaggagaagactgtaaaagcatttgcttgcgttaattcg

SEQ ID NO: 43 - DNA, 6514 bp, Escherichia coli
gaaatttcgcgacagagatccttaacggtgcgtcgagcttcgacggaattcagaataatgatggtctggtgttcggtgaatcgtgctttgcgcatggcgatctcctatcagaacaaaaccagtatgccggatgatctctaaaagtgaatggaccgatatgcagggatgcttacagtgggtcttcgacctttataagcatagtaaagaatagaatatgccaatgtacgataatctgtgcactctattacctgcgcaaaaaagtacaccagaattgtttgtctggtttggcaaattgagatcattaggcggcatagcgaatgactttaaatgaaaagcccgattcatcaataaagattgttaaaacaaaaaccttgcccccagcagagggcgagcgccgggcaatgcgtggctatatgggccaatatgaaagagccggtgcagccatttatgctgaattagagcgtgggcaattggagtggataggcgtagcggaccgcagtgcgggtatcgttgatgatttagtacttggatttaatggccttatcgttgggcaccagttcaaaacgtcccgtttccctggtacatttacagtacagacactcttagtagggtctgatggtctgcttaagccattagtttgcgcctggcaaaatctttgtagtgctaacccaacgtctcaggtagaaattcgtttagttgtcaacgattatccatcagttaacgacgctcccggaatggaagctccagctcatagcgctgccttccttgatgagtttgaacattatcccaaacgcacgcttgaggaatggcgctacagtaactggggccgtttagtcgaaatattatttcaacattcctgcctaggtgacgatgatttcgagagattttttcatgcgttgcgcataattcatggttctgcagcagattttatacaattccataaactcagtgcagaacaagcgagactggcgtctgatatagcaaaaatattacctcgactggtctccgataaacgagatagggatcgatggtcctgtgaagaactattatatgaactagggtggaaagatcccaccaaaacacgccacttacatcgttttcccatcggtgctcacgtccaacgcaaccgcgatacggaactacaacttctccagacgatacgcaacacaatccagggctatgtggcattgattgggcctccaggttcggggaaatcgaccttgctacagacaaccctagctaccgagtataacactcgggtcgtgcgctatctggctttcataccgggcgctgcgcaaggtgtagggcgcggggaagctgatgatttcttcgaagacatttctgcccagttacgcagcagcgggctgcctggacttcgccttcgagacagcagccaatttgaaaggcgcgaacaattcggtgaactgctcaaacaagctggcgagcgttatcaacgtgatacagtaagaaccatcattattgttgatgggctggatcatatcccccgcgaagaactaccagcccattcgctgttaggggaattgccgctgcctgcagccatccctttgggcgtgacatttatacttggcacccagcgactggaactcaggcatctcaaacccgcagtacaggaacaggctgggcatccggatcgtctcgtaacaatgcatccacttgagagagtggcggtcgccaggatggcagacgttttaggtcttgattcaaccatttcgcgtgtaaaactttatgaacttagccgcggtcatccgctggcggccaattatctcattaaggcactgttatcggctgatgaacaggacatatcatgcatcctcgccggagggatggaatttaatggcgatattgaatcagtttacgcatctgcctggagagaaatcgcaaacgaccctgatgttatgcatgtactgggtttcattgcccgtgtcgaagctccgatgccgctgaaattgctggcaacaatcgtagatgctcaggcgatagagcgtaccttaaagaccgtccggcatttactcaaggaaacctcaaaggggtggactgtattccataacagcttccgtctatttgtgctctccaaaccaaagataacactgggcagtatagatgaaacctattcacaacatatttatcgtgaattagctaaactatctcgtcatgcaccagaacattcattacagtcctggctaacactgcgctatctcgcccggtcaggagagcgtgatgaacttctggcactcgcaactccagcatattttcgacaccagtttgcacatggacgttcctgttcagagattgatgcggacattcacttggctctgattgctgcgcgttccacgtatgatggtgtaattgccacacggttattactttgccgtgatgagatatccagacgaactcaagcactggagtatgccaatgaacttccgcgcgcgatgttaaaagttggcgatattgatgcggcgatctctttcgtccaggactttcccaatgcgggctatgaagttgttgaccttcttttggaacagggtgattttgaccgcgcgaaagaactgtttgagcaccttgagccattatctcaattgcatacccccagattcgagcactatggggattcgcataatctacaagaattcaaaaaatgggcaaaacgagttgttcacttccgcgacgctgagcaaattaagcaggcaatagactatttgaccgttgaggggtttaaacacgccacaagtgtatcaaccgatgaaaatatttcctctattcgcgaacagttaaagtggacagtggtcgaggcaattgttaactggcaatcagacgttaatattcaggatacctgcaatcagtatggcattcatgtgcaagagataccggttttgatgactcaggctggatttattgctagagacagaggaaataacaccttagcatcggaattatttaagactgccatggcattgtctgattttaatgatgtttctaatggggggcgaagatcgattgcattattttatgccacatcaggctgcaccgatctggcttcaaaattattcgaaaacctttttgcgcctgcaatttcgatgggagacaatgaattagaatcaacaaaagcactgacgcttgcagccatggaacatgcgcaactttgcgttttgctcggcaaatccttgcccgacgtagtcacctcaacacacgctatcttacgaccgctgcagacacatgcttcagaaacgggacgcttgttggggctgtccataataaatgcctcatgtattccttctggaaatattaaaatggtctgtcgcatggtgatgagatatgtaatgcaactcaatagctattctggaaacgatacctatcaggctcaattggcattgacagctacatcaccactgatttgtacattaattaaaatttctgcgctgtgtggtaaggttgaatattattcagtaataaatgaaattgataatgcaatgcctgctttaatattaaaaggcaatacactactccggcgtgaaatagcattggcaatgtatcaggctgacggtgaccgtgaaagggcggccgccagatttgagcctatggtaaacgagttggtagaaaatacacctagcgagcaactcgagactctgtcagttctggcaaacagctttgctgcaattggcgatgttgaccgggcactaaacttacttgcttcgatacatgaccactgtttaggctacgctctggcagcgcgtaaggaccctttatactctgtttggaaagacatattgattttggccaatgcggcagacccagaacaccgtgctcaacgaataggtcagttgatacgacaggttgatggtatgaaggaaaccgagggagcatctgccgcatatcgtttgacagaagtgttaatcaatgaagcaatgcgtatgaatgcgcacagtggttataccgtggcacagaaactcagcaactgggggctgattccatggccaaatcaggtaaatgaactggtaattggtatgctagatcgccgtcctgaaatggtgtttctctgtacacaaatttggtgcgggctatgccttccattctacattgaaccctattatcgtgaccctacacatgtaggcaattatattgacgttgctgcaaatgcagcggggccttcatcaattgccaaactggtatcaattctattaccggcaatccaggttcatagtcgagctcacgagcgactcacgctaataaatcgcctgagcaaggcggcattaagacacggttataccgataaccaacttgataatgccattactcgatggacttcagaggcccccgaagcccgccgctcctacacgccacaaacgtacgacgaagcttcaacccttgacgaacttcaacaggcatttgaatcaaatgattccgaacctgagtatcatgcgccttatcgtttttgtgagcttgcagagtccgccgcattagacaaggtggtgaaaatgtatgagtgctggcattgcctgcagtcggatgcacgttgtcgttttttggttgcagagcggctagttaatgcgggggacacgacgttagccagaaaattagttgatgattacgataccagtagtgaccgggagatgtcatggagccaatggttaggaggaaatcgattccgtctcttccacgcgcgtaagctactcgatggagcagcaattcatcatgaagcatatgaagacttcatcagttcaattgtggctgggaaagagagcaccatgtcgttgctaacagatatggcagacattcttcctgtgatctgtgagtcgccagactggcccgccgtctggtctatcctggcagagcagatgtctttcactcgcgaacaccgtattggtgaacttttcgaatttggaaatgaaaatatgaccgacgaagagttacttgcggaattgctccatttttcattacgattgcctatcaccgaagctcgacgacacgcagagaaaactgcactaattctggcggtacattcaacaggagggcaaatcgtatttgagaacaccataacacgactcctgaacggcacccttgatgaaccattccaggcattgcaaattttgcttttgctaaaacagaaccactttgctgctaaatttggtgatttagtctctggccttacgaatcatcgtgatgtagctgttgctgaagctgcgtgcttgttagcacaatattggcagctacctgtatcgattgattttcatccgttgccgttgacctatcgattggcactcgacggagaccctgatcatgaaaatgctctgttagatcctgtgagtggggcaatgcgtattgaagtcgacttaggatggacacaaatgcttcgtcccgttgcacggagacttgcagagtttgctgattgtgacgaaatgaacatacgccagcgtgccgcaacgtttattcagcaatggggagggctggcagcctttggccctggagcaacaaaaaaaatcgaatctcagttacgcacactctcaatgcaaatcacctatcttaagccccatgcttacattggcatactggcacttcgtcatgtcgctggagagctgagcttggcaggcttgctctcgccaagggataaaccatcgctactggaacaaatggatgcagtacttccgccaactcctcgccctgaaatgcaaatccggccaactggcattaggcgaccgcttaaagtcaaggatgccccgtggagtgaagctgaagaaatgtggacaaatttggttgacgaggatgttaaaccctggataggtcgtgccgacgaattcgtaatagccgaggtttcacaattcaaaatgcatgatacccggcgtgctgaatatcaggtctatcgtattagcgcacctcaaattcatatttctgatgccaaattcatggcatggtatcaaagtttgcccgctgtcgtttggctgggaaaaatgatcccacttgacgaagacctcgcaccgacaatagtcaggcgtgtagtaagctccatcgggacaatgtcttcgccgggatatgccattgcattatgtcctaatatccagatgcatctgggatggcatgaatgctgcgagatgcctaatatttataccgaccagaactcaacaatcgtagcaagattagtgaactggcgagacgccgggccagtggatattgatgatgattatatatggggggaaggttgctatctgacgctttccaatgcaggcctgatacaagtcaagactctgttcggcgaattcaccgtgcgtaatttcgcaagcagggctgttcggcaattgcgacaaggcgaagcgcaaatgataaagacagctcagaatcagttcccgatactgtagcgagacgatttcacaacacggttcgattacctgacttctccaaccatggtctgaagaagtcagggagtgtagatcatgccggcattctgtttctgaatggcgcaggatttcgggtcagggtcaccacaacaggcttgtccttttct

SEQ ID NO: 44 - DNA, 7175 bp, Salmonella enterica
acaattttttgccataagacgctttcctgaaactcttctcattctcagcaggaaagcgttctcttctcaatactctctggttatagagtattaaaaaataaggagttataatccttgtagcccaactgacataaggacgatgctcaatgtctgacagcctgcttgttcgcaccagtagagatggcgatcagtttcattatctttgggcggctcgccgcgcccttcgactactggaacctcagtcaactcttgttgccctgaccattgaaggggcatcaacgacggaaatgggctctcagccagtggttgaggatggggaggagctgattgatattgctgaatattacggcagtaacgagctcgcaacagcaacaactgttcgttatatgcagctaaagcattcaacaatgcactcagatactccatttccccctagtgggttacaaaaaaccatcgaaggttttgcaacccgttataaggcacttatacaaaaaataccggtagaaacgttacgcactaaactcgagttctggtttgtgacgaaccgtccagtcagtagcagcttcagtgaagcgatcaatgatgccgcgaaccaacacgttacacgccatccacatgatctggcgaaacttgagaaatttaccgggcttcaaggcgctgagttatcgatattctgccagcttttacatatagaaggtcagcaggacgatttatggagtcagcggaatatcctgctaagagaatcagcgggatatctccccgacctggatactgaagcccctctgaaattaaaagagctggttaacagaaaagcgttaaccgaaagcgccgcaaatccttccattaccagaatggatgtgttgcgtgctttgggggtggatgaaacagatctttttcctgcgccctgtcgtattgaaagaatagaaaattccgtctcaagaactcaagaggcgacgctggttcaacgtgttgttgaagcattcggcgcacctgtgatcatccatgccgatgccggtgtggggaaatcaattttctctactcatatagaggagcatcttcccactggttctgttagcatcttatatgactgtttcggactgggtcagtaccgtaacgcgtcttcctaccgccaccaccatcgtacagcattggttcagatggctaatgaaatggcatctcgtggtctctgtcatccattgatcccaaatgctggtactggcatatcccagtatatgcgtgcgtttctgcatcgcctttctcagagcatttcaatactccgggcctctgagcccttggccgtattgtgtattattattgatgctgcggacaatgcacagatggcggcggaagaaatcggtgaaacgcgttcttttatcaaagatttaattagagaaaagcttcctgatggagtctgccttgttgcactttgccgaccttatagacgggaattacttgatccacctcctgaagcactcacattatccctacaaacttttaatcgcgatgagacagccgctcatcttcaccaaaaatttccagatgccagcgaaagtgatgttgacgagttccatcgtctaagctcttgcaacccccgggttcaggctctgtcattatcacaaaatcttccactgaacgacacattgagacttttggggccaaatcccaaaacggtagaagatactattggtgaagtgctggaaaaatccattgctcgcttacgtgatacagccggaatatctgaacgtgctcaaattgatacgatttgttccgcactggcaatattgcgtccattaattccattatctgtgctatctgccatttccggagtagctggttctgctattaaaagtttcgcacttgatctgggacgcccgttaatcgttagtggcgagactattcagttctttgatgaaccggccgaaacatggtttcagaggcgctttaggccatcggccgctgatctgcatcagtttattactaaactgagaccactaacaaaagatagttcctatgcagcatcagttttacctgcattgatgctggaaggaaaccagctttctgaactgatcgagctagcgatatcctcacaagctctgcctgaaaccagcgcggttgaacgcagggacatagaacttcaaagattacagtttgcgttaaaagcagccttacgcacaggtcgataccaggatgcggctaaactggcactgaaagctggtggagaatgcgcgggtgacaacaggcaaagagtcctgctgagggacaatatcgatctggcagcaaaatttgtgggaagcaacggcgttcaggaactggtttcccgtaacgcatttccagatactggctggcctggctccagaaatgcttattatgccgcaatactttccgaatatcctgaactctcaggagaggcccgcagtcgccttcgactcaccatggagtggttaacaaactggagtcaattaccagatgatgagcggagcaggcaaaatgttaccgatcaggacagagcggtaatgctcattgcctgcctgaatattcatggcgcggaagcggcagcaagggagctcagaaggtggcggcctcgaaaactatcttttgacgctggaaaaattgttgccatgcagttactggcccacgcccgttatgatgaacttgatcagttggctattgcggctggaaacgatatcagcctggttatgggaattgtactggaagcaagaaaacttcaccgtccagtcgctgaacaagcaatcagaagaacctggcgcttgttaaaaagtcagcgagtcagcattaaagacagaaaccacgctaataaccagacaatagcagcaatcactggcatggttgaaatggcgcttatccaatctgtttgtactgaatcagaaagcatccagttgttggatcgttatttaccaaaggttcccccctatgctctgacttctgagtatagtaaagaaagagttgcttacgtccgggcatatgctctgcaggcaaacctgatgggctctcaattagcgcttagcgatttagcctccacagaggttaaaaaagaacttatggctgaaaaacgccacggcgaatctgatgacctgcgtcaactgaagcagtacagcggagtattaatcccttggtataatttatgggccaaagtaattcttggtaaaacaaggaaagcagacttagaaagtgagctaagtgatactcaaaaagaatcgacggctattaaaggtcattcttactctgagcattcattatcatcaaatgagatcgcaaatgtatggtttgatattctgatcgaagcaggtaatgtatcaaaagacgatgtggaaaacatcatcaaatggagtcagcataaagggaatagagtattcacaccaacgcttcaccgtttcagttctgtatgtgcagagatttcagggcttggagagctttcatatcacttcgcagaacttgccttatctttatggagggatgagcactctgatgctcagatcaaagctgacggctatatagacctttcccgttcactcatttcacttgatgaaccagaagctaaagaatactttaaccaagcgattgaagttacaaataagttaggcgatgaaaatttaagtcgatgggaagcgatacttgatcttgctgaatatgttgctggtaaaacgcaagtccctcctgaaatttcctataaactagcccgatgtgcggaactaaccagagaatatgttgatcgtgataaacattttgcatggagtgatactgttgagattttggctgagttatgtccatcttcagccctagcaataataagtcgttggcgtgaccgtacatttggcaatcatagaagcatactggcatggaccattgagcatcttgtaaagaaaaataaaattaatgcactcgatgcacttcctttaatcacatttgagaatgattggcataaatgcgacttgcttgattcagttttatcctcgtgtactgatgacaaagataagatcatggcattcgaagtggtttaccactatacaaaatttaacgtacaaaatatccaaaatcttaaaaagctggatgctatttctacatcattaggtattgaacacacagaactgaaagaaagaatttcaggtctacaacatactgagacggtttcaaaaaaatccagtctctcatcgaatgataatgagcaaggccatgaccaggaatgggagtccatttttaaagattgtgatttatcgtctattgatggtattagtgcagcatacgaaaaatttcgtaatgttcctgaattctattccaaagaaaccttcatcaagaaagcaataagccgagttaagacgggcaaagaatgtagtttcattactgccattggtgctatatttcactgggggctttatgattttaaatatattcttgaatctatacccgacgaatggacatctcgtttaagcattaaaaccaccctggcaggtttaataaaagaatattgccaacgcttctgtatgcgaatcagaaaaagtcgcgtttacgagatttttcccttcagtctggccagcaggctttctggtataagtgaaaaagagattttcggtattaccctggaggccattgcagaatcgccagagcccgcaaactctgaccgtttatttagccttcctggccttcttgttagtaaactggagagtaatgaagcgttagatgtattatcttatgccttggatttattcgacgaggtgctaaaagatgaggatggtgacggcccatggaacgagaaattatctccgccaactcatgtagaggattcacttgcaggctatatttgggcgcggctgggttctccggaggcggaaatgcgctggcaggcagcacatgcggttctggcactatgtcgaatgagtcgtacatgcgttatacaaggaattttccagcacgcaataaatgctaccactttacctttttgtgatcgcaatctgcccttttataccctccatgctcaattgtggttgatgatcgctgctgcaagggttgcgctggatgatggaaaatcgctgattcccaatattggttatttctaccattatgccactactgatcagccacatgtattaatccgtcattttgctgccagaactttacttgcactgcatgatagcgacctgatctctatcccagcacaagaagagaataaactccgaaatataaaccagtctacgactctccctgtgcttgataaggttgaagatcatagaggtgaagattcatatacttttggtatcgactttggcccttactggctaaaacctctgggacgttgtttcggtgtatctcaaaaacagttagaacctgaaatgcttcgcattattcgtgatgttcttggttttaaaggtagccgcaactgggatgaggatgagcgtaataaacgacgctattatcaagacagagataatcatcacagtcatggttcctatccacgggtcgatgactaccatttttacttgtcataccatgcaatgtttatgaccgctgggcagttattagcgacaaaaccattagttggtagtgactacgacgatgtcgaggatgttttccaggactggttaagaagacatgatatttctcggaacgatcatcgctggctcgccgatcggagagatattccccccaaagagcgctccagttggcttaatagcagttctgacaatagggatgaatggctagcgtcaatctctgaaaatgtatttaacgaaacactatgtcccagccccggactattaacgctatggggacgttggtctgacgtttgttcagatcgaaaagaatctattattgtccattctgcgttagtatcgccggagcgatctttatcgctcctcagagcattacaaacaactaaaaatgtatatgactataaaatccctgatgctggagataatcttgaaatagatcacgcacactatcagctaaaaggatggattaaagatattgctgaatactgtggaattgatgagtttgatccctgggcaggtaatgtaaggtttccaatcccagaaccagcctcatttatcattgatgcgatgaaattaactactgataaagatcatcgggtatggtattcaccttctgatgttgaaccggcgatgatttccagtatctggggccatctatcaggtaaaaatgatgaggaaaaatcacatggttataggctatgtgcttcaatacacttcataaaatcagcattagaaacattcaacatggatctcattttagaggttgatgttgatcgctattcacggaacagcagatatgaacggaataatgaaaatgagctcgacaatatcccttcaagcactcgactcttcctcttccgacatgacggaaccatccacacgctatacggcaattatagaaatggggaaaaaactagttgatgagcttgagctaaatgactctgttgatacattaagcagatggatggctcatcatatcgcagagctcatttatgatgctgaacattgtacagacgacatcgtccgtacagctaaacaagcggagattagggactctatctggtcattctggtctaacagatacgaattgccaattggtagcagaccatttcaggagctcgaacctattctaagaaccttaaaaggtcttgatcctgaaaatgagcaaccgagatttttttcaccttaccgagatctaattaatgtagaaaaagaaaccagtgaggtccaaaaatggctaaccgccgctaaggatattgattcagcagcaaaaatactgattgattactgtttatcgttagcagcagaaaatgctatcgataaatcccaagaatgggtggaattagcacagaaagctggattgaacaaagatgttgatctgcttgaaattcgtatctttcagttacgaggtaccccagccaatacagacaatcccaataatgcacaacggagaatactggaaaaaaggcaaaaaaggcttgaagcttttctcttattgggctcccagttaaacgaacaactcaaatctcagcttgaagccttaccagcaattgaggatgagccaacggatgacgacgaagacttttgatatgacttgctttagcactggagacggctcacaagacggaccacataatagcctaacccaagacttttctactagtcctaatg

SEQ ID NO: 45 - DNA, 6261 bp, Salmonella enterica
ttgtgcgtagcacttctccagtttttgttgaaacagataaagagactaaatcgatcattcgaacccaaaaatggccgatttgatgcagacaacgatttaagccatatctggtagcgcaatcgtcacctatgacaaaagttacatacttgtaatattctgaattcaatattcttcgtgaaattcattcaatgcttctttgagtagtgttttggcgttatgataatttcctaaatatcataaggttatcaggcggtgatgtatgaggcgatttgtctatggcgattaaaaacagcgcaatcatttatgcaggctatgattatcagacactccaaggtgtcaggctactggcggattggctcaatacaccaactaaatataaccgaatagcatttgaggctgatgcgaaacaagttgatgctccacaaggcattgatgatattgtctgcgaacgtcaggatggtaaaacagatttttggcaagttaagtttacgccagataccgacaaagaagacaatcaactatcatgggaatggttactgaaacgtagtggtcatagtattcgagctcgttctatactgcaaaaaatagctgatgctgttgataaagtacctgcggaaagaaggggagatattactcttttgaccaataaaatacctaatcgtgagatagcaacttgcttgcgaaataacaaaatagattggaatcaggttccaattgctaagcagcaaagcattattcttcagttaggtacccaggaaagagcaaagcaatttttcgatatattacaaatatgtcatagtgatcaaagttatacgcgattaaatagtattgtcccagaactacttcgcaaacataccaacgaggagggggtatatcgcctgattgaacgagctaaacgttgggctatccagcgtaattcaccttcggatggtggatggatatgtcttgaacatattcgtgcagtgatttcaactaatagacctgaacctattccgcagacttttgtcttgccagataactatattgttcctgatgcagattttcacgacaaattcattgattcactttttaatcctactaatcgattagttgtcttaactggtgctccaggaaagggtaaaagtacttacatcagccatatttgtcagatattacaaactcgcgagtttccttatattcgccatcattattttcttgggttagatgatcgtacgacagatagattaagtcccagaatcgttgctgaagacttgatgtgtcaggtcaaagcattttgctcacaaatcgaaatgaaaaattatcatgcagagcacctacataaagtgctggctgaatgtgggcagatatataaagaagaaggtaaacgatttttcatcattattgatggtttggatcatgtctggcgtgataacggcaaagataaatctccactggatgagctattttgccaattgttaccgttgcctgataatgtaacattattggttggtactcaaccagtagatgatgagctattgccatcaagattgttacagaacagtccaagagaagaatggttgcacctaccaaatatgtcaggcgatgctattcgtaaatatctatcgggacaagttgaaagtggccgtatcgtattcaattttcatcaaagccagtatgaagaagttttatcacagtgtgctgagttgttgactactaaaactcagggatatcctcttcatgttatctactcatgtgaaaaattacatgttgaaggtaaagggttatcgcactgggaaatagaaaacctgcctcgctgcgaaggcggaaacattacaaattattataatgaattatggaaaatattaaattacgagcaacgcgatattcttcatctctgttgtgcttttccttttttatggcctgccacatcattttctgagattttttctgagaggactgaaactataccgaatgttaaggctgtaatccatttgctttatgagtccattgctggattaagaccgtttcatgaaagcttgattgtttttacccgtagcacaactgaacatgagaatagaataaaattattattgccagcgctaatttcatggctggagaaaagcgcacccaaaccgataaaaaattgttggtactggtcatgtcttgcttacaatggtgatccatatcctttaagaaatggcttaactagagactggatattggaacggttggctgaagggtatcgacaggatgagtttattcgattactcactcaggctgaaacttctgctttagccgaagggcattttagtgaggcctatcagcatcgttcacgcaagactcgactacttaatgctaggttgcaaatctgggatatgtcgacgttgggcgtttgcagtatgattaatgcttctgaagcattgcttaaacaatatcaatctacccagaatgtcagttcaccaaagatactggcaactttggctatcgctttatggtttcgtaatcatttcgatgaagcaaagcgcattacaagattggcgttacaacgctactcaaatgaatcatccgtatataccaataaaaatagcgatgagtcgcgtgctgacattcgtttattaatcaaagctgctgttttgactgagtgtttcgatgaaaaatggttggcaaccggttcagtacacaagtggagtgatagtaatattaatctgcttatcgaatgtgcggaatataaatcagatataggattactattttcattacatgatgtttttaagcaaactgtcataaaaaataaaatagtaaatgcgattgtcagagttgggattgttgaacaaatagatttagaatactggccacatttttctggtcttgactccgctctgctgcggttatacagtcatttatccactgcacatccatgttcacttataacagagcaaggtgaaagtgaaatcggtagatatcatgttcatccagaagtatcctacgatgaatggttctatgacagccttttttatcgtcttaatgccagtggagattattgttggctaccggttagcacgggggaaggacaggaggaagtcagcagtcattttctccatttaaatgatttctcagatattattgctgaaagtatggctctaaatattcaacaaagcttcagcgatttttgttcacttattgctttggtatcagatcttaaagatcatcaaatgcaaatccaacagaagcgaatgttttttaaaactgattgggtaagcattgctttaaatttacacttaatcatgcattgcaagccggttaatacggaagaaattgatattattcttaattctgagcatacagccctgtatcggctgcataaaactattcttaactttcatagtagagccttcgaatctgatgcaatagcaaactttctggtatttgaggatgggaggcagaaggaaaaactacaagagacaaatgaatatttggcgaataatcttgagttgtcagagattgcgcttcattatgatctcaatcaatcaattttttttgagcgagtcaagttatgttgggactatggtctgggatacggacatcataaagatatagctctgaatcaggtgctgactgcaataaaaactattgcaactgttgagcctaaatatgcattaacgcagcttgagcgtgtgagtccattggttcataatatttgtgacttcacagatggtgaccatactcaacattccgtaacggaattgtctgcgctatatgctcatctttctccccttactttaagtagtatctatgacagttatgttagcgagggtgagtggtatgatgcggataatgcattaacgcaatacttaaaacatgctgatctatcatcacctttcgttgagagtttatgccggacattactagatgatgggcaaattgaaataatacagaatcgtgctaaagacaatgccatattgactacgttttggccggaaatattaccacgaaaaatggattatagtagtagcgcaaaacgttcattaagggggactgaaaaatttgatccagcaaaaatcagccctgctgatgtaactaatttactcaatgttcggtcaagttatgaaaatattcctaagtggtatcattattggaaagaccaaggaaaagttacagaagtaattaacgtattgctgccaatcattaataatggcttgccagaatatagtgaatttcgttatatattatctgatttatttgaagatacattgcgtttgaaaggtaaaaaatatgcttttcccattttagtgcaggaacatattcagcgaaatggttggggtgaatggggggagtctgatgatcaaacatatgctcggttagataaagttatcagattgtatccggataaaattgatgactttctttacaagacgactcgacttcatcactataaaactaaagaagagaacttggtaattcccgggaataagctaacatatttattagtaaatgtaggccgagtggatgaggcgaaaagtctatgtgaagcgatgatttcggaggtagaggcagaaacccagaatcttccgttgtgcaaacctcaatggcaatgggagggagaattagataacgatatgatcgccgttaaattcatcattcgtcgtcttttttggcctgttcaatgtgtaaaacatcttgtcgctgatcaattgtctcatctcttagttaatggtcaatgtgctgaagaaattgaaaatttacttgtagttgagatgggaaatcgtcaactggagtcagaggtggtagatattttaactgttctctggttagctagtttgaaaggttataaggttcagaataatatatcttcctttatttatgctcgtagctttctttcagatgcattgctggaggctatcgttccaaatttaccaaacctcagtcgctatcaagtgctgtataaacatcctgatgatgatggtaatcactatggctttgaaaaaacacttggcaatgaacttccccatatattttgggatgaagtaaaaaggcttgaggagaaatctggagctccggctaaaatattaatgaaaaaagaatggaatgatatttgttataatcatgttcaacgatgggaaagggttgattatttcttcggttcagagcgtgatggttttactatgagtttttccacaaggaatacacgatttggtatatctgcatacttgagaaccattaaccggcttatcaacgaatttagaatgccaaagcattatgcagaacattattcgatttgtttaatgtcagccaacccattattttattccgtatctaatcaccgacctggttggttacctttatggcaatatggggagattaccacaaaggaaaatgtaaaaacatatgttgaggaatgcctgaatgcattcaaaaatgaacaggaaaattcaatattaggagcattgtcattacctgtacgcatcgatgaaaataattggttagatattacggctgttatggggatacaaacagaagaatatgcctcttttaagatacaacatgccgactgtggtcatagtgtagatagtttacttcaagcttatagaaatattaaattttcatttgcaaaatgggctgaataccaaaattgtgtaccactattgggaagtacacgcgaattactgagaatagcacggtgggatataatgtacgaatttcgtgggcttttctcattcggttgccaggaacaggttactgcctacccggctaaaaatcgtattaacttcgattatcagggtaaaaccatcggctatagtgacttctggcaagcaataccattatcaatttatcctaaggatatacgctcacctgttgctacttacactgcttatgataaggaccttgcctgtaactggaaaaatcatagcgtactgaaaaagcctaatatcatgttatgtgattgtaaggtactaaagagagaaaatagttacagtccttttgaaatatcagatattcgttttcactttgaatctgagccgttatagtaaggattattttgcgataattaatcaacggggagctggtcaaagtgcctgctcccatattgactaatatacaaatgtgtttgttaagacctttccaaaggtagggggaattatgaatttccgctcctcgctcatagccgcctgccagatttaaccccaccctaccacagggccccctcaagccaagccgccgccaatacaattttcccccacaccaaaacgcctccctccctagagcacgtactcacaacgccga

SEQ ID NO: 46 - DNA, 5109 bp, Escherichia coli
gggatttccaccacctcccaccgaccatctaagactttatgccactgtccctaggactgctatgtactaggagcggatgttaaactcagactcgtttcagctacattgcgttttgaataatattccatcataataactctttgaaaaatgtgatcttttcatttataacactgatgacttgcttatctcattgggatatcggaggagaatacttaactatgacaagcccgattattatgacactggctatattatatagattgatattaaaatgtaggattaggttcttgccaaggtgtcaagatttacagataggtttaaaaccatataaatatgttttacggtgagatacaatacatattgtaaggcataaacgcttggtaaaattttaattattggaagaagctaatcatggaacccatatcaattacagtggcaacttatgtagcaactaaacttattgatcaattcatctctcaagaaggatatggttgtattaagaaagcattattcccccaaaaaagatatgtggatagattatatcaactaattgaagagacggcaattgagtttgaagaaacatatccagtagaaagtggagcaataccattttatcattccgaaccattgtttgagatgttgaatgagcacatcttttttaaagagttccctgacaaagagatattattagacaagttcaaagaatatccaagtatcactcccccaactcaacaacaactcagccttttttatgagatgttatcattaaaaatcaataattgttcgaagttaaaaaagctacatatcgaagaaacgtataaagaaaaaatattcgatattaatgaagagctcattcaagtcaaacttattttacggtctatagatgagaaactaacttttcacttaagtgatgattggttaaatgaaaaaaatagtcaagcaatagctgacttgggaggtcgatacacacccgaactcaacgtaaagctagaaatagcagagatatttgatggcctcggtagaactaatgatttttctaaaatattttattcgcatatagatagctttctggtcgctggaaagaaattacatagttgcgatgtaatttcctcagaattatttgaaataaaccagtccttaaaagaaatttctgatatatatcaggagattaatttttctaaattagatgaaatccctataaataaatttaataactatgtttctagctgccagacagctattggcggagcggtatcaatattgtgggaactccgagaaaagtcagagcaagtaggtgaaaccaagcattacagtgataagtattcatctactctgcgaatgcttcgggaatttgactatgcgtgcaatgaattacgtatattcattaattcaacaacagtgaagttggctaacaacccattcttacttctcgaaggaaaagcaggaattggtaagtctcatttactggctgatgtgattaaaaatcgaattgcttctgggtatccttcactactcatactagggcaacaacttacttcagatgaatctccatggtcacaaatcttcaagagattacagcttaaaatcacttctcgtgaattcctagaaaaactgaatttatatggcaaaaaaacaggaaaaagagtcttagtttttattgatgctattaatgaaggtaatggaaataaattctggaatgacaatattaacagttttgtcgatgaaatcagatgctttgaatggcttggtctgataatgtcagtcagaacaacatatagaaatgtaacaatttcacatgagaatgttgtgcgaaataattttgaaattcatgaacatattggattccagaacgttgagttggaagcggttagtctattttatgattattacaatattgagaggccttcatctcctaaccttaatccagagtttaaaaatcctctatttcttaagttattgtgtgaaggcattaagaaaaatggtttaaccaaagtgcctgttggatttaatgggatttcaaatatttttaactttttagttgaaggggtaaataaatcattagcatcgccaaaaaaatatgcattcgatcccagttttcctcttgttaaagatgctctcaatgaaatcataaaattcaaattagagattggtcgtaatagtatttcacttaaagatgctcactcagtggttcaatctgtagttaatgattatgttgctgataaaaccttcctcagcgccttgattgacgaaggattattgactaaaggcatagtgagaaatgatgataattctactgaggaagtagtttatgtggcttttgaaaggtttgatgatcatttaactgttaattttttattaaatgatgttgaaaatatcgaaagtgaatttaagcctgatggtcgtctgaaaaaatattttcatgatgaatgtgatttttatataaaatcgggaatagtagaggcgttgtctattcaattgccagaaaggtatgaaaaagagctttatgaatttctgccggagttcagcaataatcttaaattactagaagcctttattgatagcttgatatggcgcgatattaaggctattgatttcgaaaaaattagacctttcatcaatgaacatgtttttaaatttaaagatagttttgatcatttcctcgaggcagtgatctctatttcaggtttagttggccatccctttaatgctaatttcttgcatgattggctaaaagattattctttggcaaatcgagattcgttttggactacagaacttaaatataaatatagtgaagactcagcatttaggcatctaatcgattgggcatgggccagaacagataaaagctttgtttcggatgagtcaatcgagctagttgcaactagtttatgctggtttttaacttctagtaaccgagaacttcgagattgctcaactaaggctttagtgagtttactcgagccaagaattcctgtattgagaaaaataattgataagttttatggtgtaaatgatccttacgtttgggaaagaatatttgcagttgcattaggctgtacattgcgaactgataatattaaagaactaaaatatttagccgaaactgtttaccaaaaggtattttgttctaagtatgtgtatccaaatatattacttagagattatgctagagagattattgaatttgctaatcatcttggattggaacttgaaagcattgaattatccaagactagaccaccctacaacagcatttggcctgacaagattccttcaaaagaggaactagagtccctttatgataaagaaccttatcgggaactctggagctctattatggaagatggtgacttttcacgatatactattggaacaaattataatcattctgattggtctggttgcaagtttaatgaaacccctgttgaccgtaagcaagtttttaaaactttcaaatgtaaactaactgatcaacaaaaagacttgtatgatgccacagatcctttcatttatgatgataaatgcgaaggaattaaatttggtcgtgtggtcggtagaaaagcacaggaagaaataaaggcgagcaagaaattatttaagaattcattgtcatacgatctgttaagtgagtttgaaaatgaaatagagccatacctggatcataataataatctgctggaaactgataaacactttgatcttcgactagctcaacaatttatattcaatcgtgttatagagcttggttgggatccggagaagcatggtaattttgaccaacaaataggaactggacgtggacgtagagaggcattccaagaacggattggtaaaaaataccaatggattgcttattatgaatacatggcaaggctagccgataattttactcgttttgaaggttatggtgacgaacgaaaggaaaatccataccaagggccatgggagccttacgtaagagatatagatcccactatcttacttaaagaaactggaacgaaaaaaataagcaataaagaaatgtggtggcttaatgatgaagtgtttgattggacttgctctaatgaagactgggttaaaagttctactactataactaattcatatgcttttattgaagttaaagatgataatggtgatgaatggatagtattagaaagtcatccatcatggaaagaaccaaaaattattggaaacgatgattgggggcacccacgaaaagaggtttggtatcagatcagaagttatatcgttaaagttgaagaatttgaaaattttagatgttgggcaatagctcaagactttatgggcaggtggatgccggaatgtactgatagataccaattatttaatagggagtactattggtccgaagcatttaagtcttttaaatcagattattatggtggatctgactggacttcggtaacagaccgggagtctggagctaagatagctgatgttagtgtcacttcgattaattatttgtgggaagaggagttcgacaaatcaaaaatagaaactttgaattttttgaagcctagtaacttaatctttgaaaagatgggattaaaaagtggggaagtagagggtagcttcaatgatgaaaatggaactatggtttgctttgcagctgaagctgtatatgcttcaaagccgcatctacttgttaaaaaagaaccatttttaacaatgttaagggacaatggttttgaaatcgtttggacattattaggtgaaaagggcgttatagggggctcactcatatcaagtcatcattatggtcgacaggagtttagtggagcattttattatgaagacagtcagctaacaggaagtcataaaactagctttacgagataaaaatgaatctcagagctgaatatataagtagtattagaaaccgggttatacttaagaaatcaatcttaagtgtggcagtcgaatggtagctaatatgctagcggcgctaatgcctgtttgttgctcataacaggcattcactttagttatggcagaaaagtatacatgctgggttgggaaagtgtgaaagaaaggaagattgctgcgccgtttgtcgtcacgtttatcttcattggctatgca

SEQ ID NO: 47 - DNA, 4781 bp, Escherichia coli
aaatctctttcgcgtcaatagtggtaatatttttttatcattgtcctctttctactgacatactgattgtccgacagtggagccagtcgaaattgttgacagctagtcggggctcgtctggtctttctagcagtaagaaacgtattaatattggatcgccactagtttaacagatacctcagaattatttatagactgacaccaccccggcagacgatcctgccctataggaagctaagtggaaacttatccagtaacagcttgtcgattttatcccagagggtgttcctcaggatgtatcgctgaaatcaaatccagcactaagaatgaggggtgagaaaccatttccttggtgggtctttgaccatttctgttgaactaatgtttttgggttatcaaggatacaaattcaaggcagtgtttcactaaaccttacctcgcttcaataccaatacatttttaatgggtataatatgtgactgcttttgccgcattattgacaggaacaaggactggtgatgaatattgatttcagtttaattcgtagcgcccccaaaagccgtaacgatagctttgaagcactcgccgtacagttatttaggaaaacctgtcgagtaccgacaaattcaacatttattagtctgcgtggagatggtggagacggtggcgttgaggcatatttccgctcaccggacggtgccgtattcggtgttcaggcaaaatactttttccagcttgcttccgcagagcttacacagattgatagttcccttaaagctgcgctaagcaaccatcccacactaaccgaatactggatttatataccgtttgacctgaccgggcgtgttgctgcgggaaagcgaggaaaaagccaggcggaacgctttgaagaatggaaaagtaaagtcgaatcggaagcgtcagcgaaagggaagtcactttctattgtcctttgtaccgctgctgttatctgcaatcaattacttgagatagacccttacggagggatgcgcaggtattggtttgatgacacgttgctgacaacagctcaaattcaacaatgtctggaggacgccattgcttttgccgggccaagatatacttcaatgctggatgtggtgacgaatgctcatgtcggcctggatttctttggtgggactggtgacttttgcgagtggtacgaaacatcattaacaccaatcgttcgagagttccattcactgaatggatacggacgcaaatcgctggatatactcggcgaaacccgtgctacatctgccacggcattgattgaagaaataattgcctactgtgagagcatgagagataacaatgtcacggccacatcggttacagatctttccgtcgctctgtcatccctattgacacttttcgctgatgcccgccatgctcaagaagataaattttatgaaaagcatggcaagcatagtgatacagaatcgttccgacagttccacgcagagtatatgtgtgcatttcctgccggagatatggatgcggcgagaaaatgggaagagcaggcgcagcaactgcaaaatttgctgacttctcaggtcattggtgccgcaacagcacattccttactgctggttgggccagcgggtatcggcaaaacccacgcgattgtcagcgcagcattgcgtcgactggaacatggtggtttttcactggtcgtctttggagacgactttggcaaagcagagccttgggaagtgctacgcagtaaaatagggctgggtgccgccatcgatcgttcgacattatttgaatgcatacaggcctgcgccgaacatactggcttaccttttgtcatttatatcgatgcattgaacgaaagcccgcgagaagtgcgctggaaggacaagcttcccgaattgctcgctcaatgcaagtcttatccagacatcaaaatctgcgtttcaacccgagatacctatcgcaatcttgtggtcgattcacgctttccagggtttgctttcgaacacatcggtttttcaggacatcaattcgaagcggtacaagctttcgcagcctactatgagctggatgcagagattacaccacttttttcacccgaactcggtaatcctttatttttacacttggcctgtaaaacgctaaagggcgaaggccgtgacagtctggatatttctttgccgggttttacctctctgtttcaaggacatctcaaacattgcgatgttttaattcgagaacgcctccactacgcaaaccctcgtaatctggtaagggctgcaatgatggcactcgcgaaaaccctgacacatgagttgccgcagaaccgaacgtgggaaacctgttgcgaagcactgagcaaaatagtgggaactgagaccacacctgaatcctttttaaatgcattggcacatgaaggcctcattatcctttctgttgtagatgaggataccttcctgatccgtctgggttatcaacgctacggtgacatactccgtgctatcagccttgtggaaactcttgattcggatacagtaaaactagcggagaaaattgcagcgttaacagaagaagatgctggattgctggaagctcttgccgccgtgctgccagagaaaactgctcttgaaattactgctgaagaagtaggattaccatccgaacaagcccataagctgttcatccagtcattggtttggcgctcccgacaaagtgtagtggaagaaattgatgaacacatccatgcagcactgcatacacctggattatgggagtcggtttatgaagcgctgttttcacttagtctggttcctgaccatcgtctaaacgcaactaactggctggggccatttttacggcagtcatccttagctgaacgtgacacctacttgtcattagctgcgctgggatcatttgataataagactgctgtctattcactcatccatgcagcactatttgctgacataacccattggcctgctgaaagccggaggctggccagtctaacacttgcctggctcacttcgtgtgctgaccgccgaatcagggatttatcctcaaaagggctaagcagaatcctggcaaactacccggagaactgccaaacagtaatcagtgaatttgcatattgtgatgatgattacgtattagagcgtattagccttgctatctacagtgcatgcttattgtcataccaacgcagaaatgcgtttatgccagcgctccctggtctattaagcattgcgtcagatagcaagaatattctgctccgggatacggttcagctattagtaaacttgttgaaaacaggagaatttcccacagccgtaacaagccaattacagcattaccagacaaacgtatcattaccatcacgatggcctgtactggcggatgtcaaacccctcctagatctggaacatttaccatcaaacatggtgctctggggagaatccatggccccggatttctggcgttatcaggtggaatcgaagatttccggctttgacttggagagcgccaatatcagccatgaaaacattgcctgttggttaatgcgagaagcacttaatttaggatatcccggttataaccactgcgcgctcaattatgatcgccatatcgggagtcagtatggctcgggacggggtagaaaagggtatgctgaccgactcggtaaaaaatattactggatcgccttacatcgactactgggcattctggccagtaatgttcccgcactggaagacccatattccgactacgaacctacaagtgatcttctatggtcagtcgacgtccgtaaagttgacctgaccgatgtacgcgatatcaccgcagaaggtgtctatccagtactgatggaggaaacaaattatgcattccctgaccacaattcagatatcaaaggttgggttaggaccgatgattttccaccttatgaagcttgtcttattcgaactgacgaggaaggagagcagtgggtagcgctttcacatagctattgggatgacgataaagcgccgaatgaaaatagctgggattccccgtacttgggagtgcgtgcttcctactcaagcgcactcataaatgaaagcatccagaactttaaacagaaaagatcacgcgatattttccaatataatcagggaagtagttgttatcgcggttatcttgctgaatatcctgacagcccggtatacaaacaacttcttaatagtgatgaagatagtgaagcgtttaattttacagaagtcagtttactgcgcggaaacgaatgggaatacgactactcatataccatgcccgagcgccaggataacctcattgcgccatgcctgggaattattcaaaaactcgaacttttatgggattgtcaaagcggttgggttgatcattctggcaaacttatcgccttccatcaaaaaggtgtaaaacaacgcggacttttcatccatcgttcggcattgaacgcctatctgtccataacaggtgaagagcttatacatcgccgttttgctaacagaggatattttgatttagctggtcgtaatagcacgcaaatagacctgaaaacttggatccagtaccgggcagacaaggcaccggtagttttacgagaagaggaactgccgtttaactgctgacaacgatacttattaagtaatcaactggctgccttggcatcgaatgccagaagagccatttcgcactaccaatttaagtagactgaaggaatacttggtacaagcaaacgcacgccatatcggatagaggggact

SEQ ID NO: 48 - DNA, 4964 bp, Escherichia coli
gcgcagctgacaaagattgaccgtgagcgctctgatggagaaagacgatagttgctgagtacgatatcgagggtacatttctctgtgtaggggtagttatttacaaaaaaataggagaataattaaatggtcaaaccaaactgggataactttaaagctaaatttagtgagaatcctcaaggtaattttgagtggttttgctacttgttgttctgtcaagaattcaaaatgcccgcaggtatatttagatataagaatcaatctggtatcgaaactaatccaataaccaaagataatgaaattatcggttggcaatctaaattctatgacacaaaattgtcggataacaaagctgatcttatagaaatgattgagaaaagcaaaaaggcttatccaggattaagtaaaatcattttctatactaatcaagagtgggggcaggggagaaagtcccatgaacctgaaggcgataagaacgctgataattatttggaaactgtcggaaatagtaacgatcccaaaataaaaattgaagttgatcagaaagcatatgagtcgggtatcgaaatagtatggagagttgctagtttttttgaatcaccgtttgtaatagttgagaatgaaaagattgctaaacatttcttctcccttaatgaaagcatctttgatttattagaagaaaagcgcaagcacacagaaaatgttttatatgaaattcaaaccaatatagagttcaaagacagaagtattgaaattgacagacgacattgcatagaacttctacatgagaatctagttcagaaaaaaattgtcatcgtcagcggagaaggtggggttggaaaaacagcagttatcaaaaaaatttatgaagcagaaaaacaatacactcctttctatgtctttaaggctagcgagtttaaaaaggacagcattaatgagttattcggtgcgcatggcttagacgatttctctaatgctcatcaagacgaattacgtaaagtcatagtcgtagattctgctgaaaagcttttagaactgaccaatatcgatccttttaaagaattcctgactgttttaataaaggataaatggcaggttgttttcacaacccgtaacaattacttggcagatctgaactatgctttcatagatatttataagataactcctggaaacttagtaataaagaaccttgaacgcggcgagctaatagagttatctgataacaatggatttagccttcctcaagatgttcgattattagaactaatcaaaaatccattttatctaagtgaatatttgaggttctataccggtgaaagcatcgattatgtgagcttcaaagaaaagctatggaataagattatcgtcaaaaataaaccttctcgggagcagtgtttcttagcgactgcttttcagcgggctagtgagggccaattttttgtctccccggcatgtgatactggaattttagatgagttagttaaagacggaattgtcggctatgaagctgctggttacttcattacacatgatatatacgaggaatgggcattagaaaagaaaatttctgtcgattatatccgtaaagcgaacaataacgagttcttcgaaaaaataggagaatcacttcctgttcgccgtagttttcggaattggatatctgaacgattgcttttagatgaccagtccataaagccttttatcgcagaaatagtctgtggagaaggaatatcaaatttttggaaagacgagttatgggtagctgtccttctttccgacaattcaagcatattttttaattactttaaaagatatttacttagtagtgaccagaatctattaaaaagacttactttcttattgaggcttgcttgcaaggacgttgattacgatctgcttaaacagttaggtgtaagtaattcagatctgctttccattaaatatgttcttactaagcctaagggaactggttggcagagtgtgatccaatttatctatgaaaatttagatgaaatagggatcagaaatattaattttatacttcctgtgattcaggagtggaatcaaagaaacaaagtgggtgaaacgactcgattatctagtttgatagctctaaaatattatcaatggactatagatgaggatgtctatttatccggaagggataatgagaaaaatattctgcatacgattcttcatggggcggccatgattaaacctgaaatggaagaggttttagttaaggttcttaaaaataggtggaaagagcatggtaccccatatttcgaccttatgaccttaatccttactgacttagattcatatccggtttgggcatctctcccggaatatgttctacaattggcagatctgttctggtatcggccacttaaagaaacaggcgaacgttatcacagtatggatattgaagatgagttcggtctatttaggtctcatcacgactattatccagaaagtccatatcagactcctatatattggttactacaatcacagttcaaaaaaacaatagactttattcttgattttacgaacaagacaacgatatgttttgcccactcccattttgctaaaaacgaaattgaagaagtagatgtctttattgaagaaggaaagtttataaagcaatatatatgcaatcgtctgtggtgctcataccgaggaacacaggtctctacctacttactttcatcaattcatatggcattggaaaagttttttcttgagaattttaaaaatgcagactcgaaagtgttggaaagttggcttcttttcttgttaagaaataccaagtcagcttctatttctgcagtagttacgagtattgtacttgcattccctgagaagacattcaatgtagctaaagtactattccaaacaaaggacttcttccgttttgatatgaatcgaatggttctagacagaacacataaaagttcattaatctccctcagggatggctttggcggtacagattacagaaactctttgcacgaagaagatagaattaaagcttgcgatgatgtgcatagaaatacttatcttgaaaatcttgccttgcattatcaaattttcaggagtgaaaatgtaacggagaaagatgccattgaaaggcaacaagtgctctgggatattttcgacaaatactataatcagcttccagatgaagctcaagaaactgaagccgataagacgtggaggctctgcttggcaagaatggatcggcgaaagatgaaaataactaccaaggagaaagatgaagggattgagatatcattcaatcctgagattgaccctaaactaaagcaatatagtgaggaagcaataaagaaaaactccgagcatatgaagtatgtaacgctgaaactatgggcaagctataaaagagaaaaggatgaacgttataagaattatggaatgtatgaggacaatccgcaaattgctttacaagagaccaaagaaataataaaaaagcttaatgaggaagggggtgaagatttcagactattaaatggtaatataccagcagacgtttgttctgtattactgttagattattttaatcagttgaataatgaagagagagaatactgtaaagatattgttctagcgtattctaaacttccgttgaaggaaggctataattatcaggtacaagatggaacaacctcggcaatttcagccttacccgtgatttatcataattatccaatggaaagggagactataaaaacaatattacttttgacactgtttaatgaccactctattggaatggcaggtgggcgctactcagtatttcctagtatggtgattcataaattatggctagactattttgatgatatgcagtccctattgtttggttttttgattttaaagccaaaatatgtaatcctttcaagaaaaatcattcatgaaagttatcgtcaagtagactatgacattaaaaaaataaatattaataaggtgtttttaaataactataagcattgcatatcaaatgtcatcgataataaaatatctatagatgatttgggaagtatggataaagttgatctacatattttgaacacagctttccaattaattccagttgatactgttaatattgaacataagaaattggtttccttaattgttaaaagattttctacaagcctattgtcaagtgttcgagaagatagagttgattacgctcttcggcagtctttcttggaaagatttgcctactttacgcttcatgcgcccgtgagcgatattcccgattatataaaaccttttcttgatggtttcaacggttcagagcctatttcagagttatttaaaaaatttattctcgtcgaagatagattaaatacttacgccaaattttggaaggtttgggatttgttttttgataaagtggttactttgtgcaaggatggagataggtattggtatgtagataaaattataaaaagttacctttttgctgaatctccatggaaagaaaactctaatggttggcacacatttaaagatagcaatagtcaattcttttgcgatgtatctaggactatgggccattgcccttcaactttatattctcttgccaaatctttgaataacattgccagttgctatcttaatcaaggtataacttggctttcagaaatattgtcggttaataaaaagctatgggaaaagaaattggaaaatgatactgtttattatttggaatgtttggttaggcggtatattaacaatgagcgtgagcgaattagacgaaccaaacagttgaaacaagaggtcttagtaatattggattttttggtagagaaaggatcggttgttggttatatgtcacgggaaaatattctgtgatgtagttgaaaataataattttaatgagagcttttccaatttaggctccagggattggagcctttttattatcg

SEQ ID NO: 49 - DNA, 12191 bp, Obesumbacterium proteus
accttcttcgctaactgatggctaatgaggccgtaataaaacttaccttacctgtaaatacttttactactcattcagatcagaatgaagaggtttattttatttcattgaaaattaataaataaaaatattggcacggtatgtgcttatacagaatgccattttactaacaaggaatttaccgatgtcggaattaaaaaaatttcaggtacaaacagcacgtgcattgccggtgattgtgttggcggataccagtgggagtatgtcaacagatggcaagattgatgcacttaatctggggctcagggaaatgcttgatagttttaaacaagagagccgcctgcgcgctgaaattcaggtcagcgttattacgtttggtggtcaccaggctgaagttagcttgccattgacgcctgctcaccagttgcaaagtattacctccctggaggcaaatggcatgactccactgggtggcgcactatcgctggcctgcgagattattgaaaatccaacgcgaaaatttcagccgattatcgtgcttatctccgatggctaccctaacgacgactgggaagccccttttgctcgcctgattcacggtgaacttactgccaaggcctcccgttttgccatggctatcggtgcagatgccgatgaatcaatgctcaacgaatttgcaaatgatcctgaggctcctctcttccacgcagaaaacgcgcgtgacattcgccgttttttcagagcggtaagcatgagcgtcagcgcacgaagccgttccgcaaccccgaatcagtctacaccgttgcagatcccgagtgctgatgatcaggactgggagttctgatgcgcctgtacgcttctggcacctcggtacgtggtcccgcacaccaacaggatgatgaacccaatcaggatgctgtagggatttacggtctgcgtggtggctggtgtattgccgttgctgacgggttgggtagccgatcaaaaagtcatttgggttcccgtaaggcagtcaatctgctgcggcagatcatgcgcggtgcggagatgctggtcgctgccgaagtgactccagcgttacgtgaagcttggctaaaccactttggtactgactatcacgattacgaaactacctgtttgtgggcctgtgtcgaggcgtcgggccatggcgtgatcggacaggtaggcgatggcctgctgctggtcagaagtgctggggtgttcaacgtaatgagcacaccacgacggggttacagcaatcacactgagactctggcacagcgtgcacatttagatagttgcagtgccagagtggcattaacccaacccggagatggcgtactgatgatgaccgacggtatcgctgatgaccttatcccggatcagctggagtcattctttaatgctatctaccaacggatacggcaatgcagcaagcgtcgtacacgtcgctggttaacacaggaacttaacggctggtcgactccaaatcatggtgacgacaagagcctcgctggaattttcaggatggactgaccacatgacatcaatagtaaaaacgcaaccaaaacgcgtggtgaaggataccaggggatcaagttacgagctgacagaggtaattaaccgtggtggacaaggcattgtttaccggacgacctatccgcaaaccctggtgaaaggttttactaatcaggacccacaggaacgccagcgctggcgcaaccatattacatggctgctcagccaggatcttagcgacctcaaacttgcacgtccattaatacttctggcggagcctcgctttggttacgtaatggagctgatggatggcctggttccattggatagcctgttgaacagctttataaacgcaggggaggagtctctggcggattatctgcgtcagggaggactccgtcggcggattcgtatcctttgccagctggcacgcacactcaatcagcttcacgcacgcggcatgttgtatggtgatctctcccccagcaatatttttgtttcagacgatccaagacacgcggagacctggcttatcgactgcgataacatcagcctgacagcccatcacaatctgactctgcataccgtggactatggtgctcccgaagtggtcaggggagaatcgttactgtccagcctgaccgatgtatggagcttcgccgtcattgcctggcaactgctgactcataaccatccgtttaaaggggaactggtcagtaatggtcctcctgagatggaagaagctgccatgcgcggtgaatacccgtggatcaatgacgcacaggatgacgcgaatcactgcttcgtcaatctgccaccggagctgattgcacatagtgcactgccaactctcttcgctcgctgctttgaacagggaaggtttgaacctcatgagcgtccgggtatggctgaatggcttgaggcgctgagtgctgtggatgagcgtctgtttacctgtgacagctgtgggggaagcacgctcctggcagaggaagcagaaagcgcgaacgatgccgtttgcttttactgtgacagtcccgccgaccgcctcctggtccggtttagtgaatatgtgactgagcaacaagacggctcgaatccagacaccaaaaccttgattgccacagggcgaaatgtatggctgcagccaggtcaccgtgttgagttaaagcgcctgttgccaagttttatctatgaccactggccatcagatcatctgcagattgattacaccgcccgcgggattgggatccatccgttgcttggcggagagctatacctacaacgcggtgaaactatcaaaccactgcgggggtttcagggactcaaaaacgagctgcgcggaacaggtggggagccttggcagatccatatcggcgatcctggccagtcgcatgtaatctggcagttcacgtggtgacaatatatgaaaattaacgaatttccactgatgtccaaagatattctgctgctggaaacggataaaggaaccaccgggttccggccaaagcaagctatcacctttcaggcgtatggtgagaattggctggcggtacagggggatcattgcgtaagtgtccagtgctcccctggtgatcacgaactctttagccgtctggtgatgagggatcaggttcgttggttgctgaccagtaaagcggaaaaacagttgcgggttcaatattgcacgcctgttgaagtcacaccaatgcagctcgagttgggaattgatgagcgaattgcggaagaccttttcgcgaaaaaacagatcaataacaacgatattgagcttgcctgccgctggtttgaagagacttttattgtccatagcgagtcagaaagtgactggttaacggttggccgttttagcaatcatgcagccaaaggtggttttcagctattgggaaacggctggcgtgcggatgttgagcgcaacccggaccacggctttcttatcagacgtattactggtcatttaagccatgatacaggcttctcgttgctggttggacacttcgccttccgggatatgtcagttgctgcggtgctgaatagtgcaacccagcaggcaatgctcgatgccgcactgcgagacagtgccagctaccttgagctctggaatctctacaacgataaagagtggcagagcgagttgaaaaaggccgaaacgctgggtgttctgcgctttgttgcgtgcgagggcaccgaagctggccgggaaaatgtctggcatctgactccccgaactcctgaagaatacagagaatttcgccagcgctggcgcgcgctcgatctgcccgcaggcactcaggttgacctgggcgctgaaactcccgactgggcagaagaactcagtaccgaagaggatacggtactgaaaacgccgcgcgggaagatcgagttcgctgatgaatatgtggtctttacttcagcctcgaatcgccgagacgtgcgccccgcaaagcctgaaggatggctctacctctcgttggcaggatatcgcacagtcggcaaacgtcgcctggcggcaaaacgtgccattgattccggtaaacgcatgccacagttgaagtggctgctggaaggggtcgttgttcctgctgctcggcgtcgcaacatccaggggatgacaccctacgcccgcgaaatctttaagggtggcaaaccaacgggcaaccaggaactggctgtgtttaccgctctgaacacacccgacattgctatcgtaattggcccgcccggaacagggaaaacccaggtgatcgctgcgctacagcgacgtctggcggaagaggcccaggaaaagaatattgctgctcaggttttaatcagcagttttcagcatgatgccgtcgataacgcgctggaccgcagtgacgttttcggtctgcctgcatcacgtgtgggcgggcgtcgtgcttcagtagaagacgagtcaccactggatccctggttgtctcgccacgccagtcatctgcaggagaaaattgctgaccagtatcaacgctacccggagttgaaaacaattgccgacctcacttcccggcttgccctgcagcgattggcaaacgacctgcctcaacaacgggcagaggctttttcgcatatttatcaggacgtcaattccctggcagagaaagggctggtcacggactcccggcttgagatacgtctgcaggactatattaagcatctgaaacaggatggtgttgctgaggtcagtacggtgatgaatgtagcagtattgcgccgcattcgcgcgttacggaccactcagactgctttctcagatgatggtgccgatcgtgcctgggatttgctgcgatggttgaagcggaatgttcctgacatcgacgctgagctgacctcggtattggaaatagctgccgatgccagagaagttcctgtggcactcgtcgagtgccagcaacagctgctggagcgttttctgcccgattatcgacctccggccctcaaaaataagatcgatgatgaaggactggctctactgaatgacctcgacaagcatctttccgacttgatgcatcggcgtaagcagggtgtggcatgggtgcttgaacaaatggccgatacgctggagatggaccgccgtgccgcacaggaggtggtggatgaatacgccatggtggtgggagcgacctgccagcaggccgccgggcaacagatggccagcctcaagtcggtttcaggagtcaagagcagtgacattgagttcgataccgtagtcgttgacgaggctgcacgcgccaaccctcttgacctgtttgtgcctatgtcgatggccacgcggagaattattctggtcggcgacgaccgccagcttccgcatatgctggaaccggatattgaaggccagttacaggaggagcatcagcttacggcactgcaactggctgcctttcgttcaagtctttttgagcgcatgaggctaaagctactggacctgcaaaagaaagataatttacagagggttgtgatgcttgataagcagttccgcatgcatccactgctgggagatttcatcagccagcagttttatgaaaaagaagggctggggagagtggaaccaggccgtagcgcagaggaatttgtctttgacgaaggtttcctgagagcgctggggccactggcgtcggcctatcgtgacaaggtctgccagtggatcgacctgcccgcttctgctgggctggcagaaaaatcaggaaccagccgtatccgcaccattgaagcggagcgtattgctcaagaggtggcacagttactgaaagccggaggagaaaccctctctgttggggtaattactttctatgccgcacaacgagaactgattatggaaaagttatccgaaatcaggctggaaggcgtgccactgatggaaaaacgtaacggaacctatgaaccgcatgaaaactttcgctgggtgcgcaagtaccgtgctgacggttcgttcagccaggaagagcggttacgagtaggttcggtggatgccttccagggtaaagagttcgatgttgtactgctatcctgcgtgcgcacctggcgtcagccgaggtcctcatctgccgccgatgatgcagctgccagggaacaaatgcttaatgaactgttcggtttcctgcgtctgcctaaccgcatgaacgtcgccatgagccgacaacgacagatgctgctttgcttcggcgatgcagcactggccaccgctcccgaagccctggaagccgcgccagcactggcagcatttcataccttatgcggaggcgttcatggcactcttcgctgaaacaggtatttatattcaatctgccccacggccgcagggtgaagcgcgcccgatactctggccagtcaggatacatagggtgctctacccggaaagctatcaggctcagatcaatgtcttccaacgcgcaattctcggattggtacgagcgcgcgtcgtacgtccgaccgaactggcagaactgaccggtctgcaccctaaacttattacgcttatcctggcacaaagcgtcagtaatggctggcttgagtccggtgaagataccctcacttcagcgggtcagcggttgctggatgatgaggatgacggtattggcaaacaaaaatcaggctatgtattgcaggatgctgtaagcggaaagttctggccgcgtctggtcagcacattgaagcaaatcgaaccggtcaatcctctggataaatatccgcaatttatactgaccaggaaaacaggagcgacactgcgacctttcctgatgaatgccagccgatcgccactgccgcctctggaacgcaaagaactgaagcgtgcctggcgtgactatcgtgacgactatcgtgccagtcagcaactgggcgtcagccgtttgccgccacacattaacctgcacggtctgcagcagctagaggaaccaccgcagtgcgcacgaatactggtgtggatcaccactgatcgagagagtggacagctatggagtgccgcggacccatttgctctgcgcagtaacgcatggtggctggacctgccttcaatcgtggaaagtgactcccggttgcaaaagatactggaaccgctggttgtggtgccacgcgccgcagaacaaacctaccagcagtggcttgaggctatcgcgcacgaaactgattttaagatgatgagtcaatacccttgggccgaacgtttaccggatgtgaaacgttatttggtggcgctattggtacatagagggaggatcgagcagggtgataacggtcaaagtgagctggatgccgcactgaacgagtgccagaagctgctggaggttgttatgcagtggctgattcgtcgtcatccagccaacgcggaattattacccaagggccgcctggataaaattaatacggccaacttgctcaaggatatgaaaataccagcatttaccccatcagttattgatggcctatctggccagataatacgtcaggtgcgctacgcatgtagcaacccatccggctcattgaaggcactactttttgcagcggctgtcggtgcgaaccaggatccacagcacccattttggtcactggatgactcagcgttacaactgccaatgctgctgcaactggcggatcgtcgcaacaagagtagtcatggacagagtaaatatcttgataagccggtacaggaactcactcagcagatggttgaggaaagtatcagttatgcattgagttttaccgaacgttttaaggaatggatgtaatgtcaaaacgagcacaacagaagtatacctcacctattcccaagcagagaaatggctctgctgcggcatctgccatcaccacacttcagaggtctgcaatgacaaccgagtcgcagattattgccgcagcccatcacacagctcagagtgaaaagcttccaaaagatatcgattttgatgtgacatggctggaacgtatcagtcaacgtcttcagcaggaaggagatgatcaatttgtctcctggcttcagacatttactcttttctgccagaaactggcgcaaagggatgaagagacgcaagcagcagcacagcgtattcaacagctggagctgacgctggaggagcaaagcgaaaagttagaacaggaccgtgttgaacatgacattcaagctcgggaactggcggaaaagaaagccgggatcgtgagcaaagaacgagagctgaatgaacgtgagctcaacgccaaagcgggcttcagcgagcagaatgcagcatcgctgcgaaacctgacccagaggcagcagttactcgaccagcagcatcaggaggatattcaacagctcatcacacaaaagcaggggttaatgcgggaaatatcgcaggccattgtccagttgacccagttacaaatccagcaaagcgacgcggaggcacagcgcagcttgtcactggaccagcgcgaagaagacatcatcaggaaagaggaggatctgaagcgcgccagccgtcgtctggaacgagacgagcggtctgtagaggcggagagacaggcgctgaacgaatgtttggctgaagcaatgcaaacagaacgccttgagtttgaaaagaagctggatcagaaagagcgtcagttcgacaaagctcaggaacgggtgcaaaacctcagtgaacgcctcatggaatgggaggaacttgatcaggcgctcaatggccaatccgcttcgcaaatgctgaatgagctggataagttacgcgatgaaaaccgcgaacttaaaagtcagttcgcgcacactaacctagcagagctggagcgcgagaacaaatctctggccaacagcaaaagcgctcttaaaaatcagctggaaaatctgcttgcagagatggacaagctacaacgcgaggtggatcttcagcgagtggctgcgacccagcttgagacagtggcacgggagaagcggcttcttgagcagcagaaacatctgcttggtcaccagattgatgagattgaagctcgtattggcaagctgaccgatgccagcaaaacccagacgccgttccctgccatgtcacaaatggacgagaagaatgggctcaacgcaaaacgtgatcatcgagaggtcggtgacctgaaaaattttgccagtgagcttcagcagcgtattgctcaggcggaagagagcgtgcagctattctatccactggaaagtatccagctgctgcttggtggtctggcgatgagccaactgcacctgttccaagggatcagcgggaccggaaaaaccagcctcgccaaggcctttgcaaaagcgatggggggattttgtaccgatatttcggtgcaggctggctggcgtgaccgcgacgatcttctaggccactataatgccttcgagcggcgctattacgagaaagactgccttcaggcactctaccgtgctcaaacaccgtactggcaggacacctgtaatgtcattcttctcgatgagatgaatctttctcgaccggagcagtattttgctgagtttctctcggccctggagaagaacagccacgctgatcgaaaaattgcccttaccgaaacagctttactcaatgccccggaacggctcgttgaaggacgccatattctggtaccaggtaacctgtggtttattggcaccgccaaccatgatgaaaccacaaatgagctggccgacaaaacctacgatcgtgcccatgtgatgacactaccgaagcacgacactcgctttcctgtcagggagatggagaaaaccagctattcgtggcggtcactgcatgaagcctttgctaaagcaaaaacgcaacatgcggaaacggtcaggaacatgctggagcaactgtccggtcatgaatttactcacctgctggaaacagattttggcatcggctggggcaaccgttttgacaagcaggcgatggatttcatcccggtgacgatggcctccggggcagaagctgggcgcgcgctcgatcatctgctggcgacccgtattatgcgctcaggtaaggttaccgggcgctataatattggcttggaatcggtcacacgactcaaagaagaacttgaatttttctggattcaggtcggtctgcaaggcgatccggttgaatctatggcattgctggaggcagatatccgccgtctgtcaggtgcgcgctgatgtggcacgatcgtttaactggtaggcaacatgcacatcttccgcaacggattgatcacgggcgttactcaatcgaggcttcccctctgacgctaaatggacatacaccgaattttttcggattgctggtcagcgacggcggagcaaattgtcggctggacgatacgctgcataacttcattcagcctccgcccggccatgaagaggaaacccggctgctggaggaagccatcaccacgatcggtgccgcagttgatgatgacatcagtgtgctatcgccgctgatgccagcagctattgtcgataatcaaagccttttgctacctttcgaacgtgcactgctggaggtgatacaaaaaggacatttacagcatatatcacagcggccgcggctggatttacgttatgacgatgaggtggccgacgttgcccgcgtgcgtcgtctggcaaagggtgcactggtacatctggcgtcacactccgaatgctggcagcgtcagacactcggcggcgtggtacccaagcagatactggcacagtttagcgaagatgatttcaatatctacgagaatcgggtttatgcgcgattactggataagatcgaacgtcatttgtatcaccggctgcgcactttgagaagcctgcaatctactcttgcccaagcactggacttctatcaatctcaggaggtgaattaccgcctgcgcaatgctatttgtcagttgtgggggatgacttacgatgaggatgcgactgatggcgcatctcggcagctcaacgccacattggcgacgctggagcaaattttccgcatcatttccggtctgcgacaaagcggcctctatctgcgggtaagtcgtactgcgcaagtgacaggtggagttcatatgacgaatattttaagtcacgatcctcactatggtcatttgcctttactatgggcacagttggctgacggggctcagcccgaaaatttgcctcaacaacgcctcagagtgaaccagagcctggcagctgcgtatagcagctatgccgggttggtgttacgccatgcgttgcagccctggttacacggtaagagtgaaggaagctgggctggtcgcactctgcgacttcgccagcaaggcatggaatggctgctgagctgtgattccaatgacagtgccagtgaagagacgctgttgtctctggtgccatttctgaaccaccagcaggtagcggtagacctaccggaaaatcggtatatcgcctggccttgcgtggggcatttacagcaggcattacctgataaagagggctggattcggctttcacctttagatatgtactgtgtagagcgttttggcttactgatagataaaattcttagccgggaattattgcgaaactttgcccgtccggttatccgtattccccggtgcgtattaccacttgctacaaaactgtcttcactgacagttgatcaacagttaaatcagataacactgcatggggatctgactaaagctgagctggaacaattaacctctcatttaatcaacaacaatgctagcacacaggcagaggaaattacgctgcgataccgggaatggcgagcattgcaacagtgccctgtctgcgaccatacaaccgaactggtttatcaatatcccggtggatttaaaaccctctgtaaaaactgcaataccgctcgttatttcagccagcatgaaaatgcacacttttttgaacaaaccagaacagtagaaagagaaagtaaaaccttcctggctcaggggcggagagtttttaactttcagttttagcagggtttttacgactcgctgcatttttaaagagttaagaataatgaaacttcagggcatcttttatatatcggtattacgcaaatcagtagtttcggttgcgcgttttgtatacataccggcaagtgtccaatcacagtgaatagccaaaatcgccgggagcacgttcggtcagcctgcggacatggtttttatcacgt

SEQ ID NO: 50 - DNA, 6873 bp, Escherichia coli
ggattcaccattatagtgacatgttcaagatgatgatatatctttgaaaagtgttctctttgcgaacggtatagaatttctagcgttacttttcataattacactttttagggttaggcaggcacaatctatgcgctgtcttagataactacatccatttttactggactaccaccaacaaaaatttagtggtgcaggagaaaacgtgaagtatcagatagtaggtggtgctggcctgcaccgcagcgaaaccaaaacagttgatatgatggttaagcagttaccagatagttggtttggctatgctggcttagttgttactgatagccaagggtcgatggaaatcgatatgctaattattactgctgaccgtctgctattagtcgagcttaaagagtggaatggtaacatcacatttgaaggggggaagtggctgcaaaatggtaagtcacgaggcaaaagtccctatcagatcaagcgtgagcatgcactgcgactaaaagatttgttgcaggaagagttatctcgtaagctgggttactttttgcatgttgaggctcatgtagtgctgtgtggcacagctggtcctgaaaacttgccattaagtgagaggcgctatgttcatacccgtgatgaattcttgactataggtaacccaaaaaattacgaaaagctggtgcaacacactaacttttttcatctttttgaagggggaaagcctcgaccaaattctgatgaggcattacctataattaagtccttctttgaaggaccaaaagtcaggcctttgccactaaaagaaagcggttatcttgcgaacgataagccattctttagtcaccctcacatggtctacaacgaattcagggctacccacaaagacaatagtcaacacagaggtctgctacggcagtggaactttgatgccttgggtgtagcaaacgcaatgcaaacattgtgggctgagatagctctgcgtgagactcgagtcggtcgcctagttcgtcatggcagcgcaactatgcaggattatatgttgcgtgctgtaagggaactatccgaggaggatataactgatgatgcccgtgagctgtatgagttacgccgtagttttagccgattagatgagattctagatagcgaagctgacggatggagtaaatctgagcgtattgatcgcgttcgtgcattattagctccattctcggaattacatagcttgggtatcagtcattgtgatattgacccgcacaatctatggtacgcaggggatcagaagagcattgtcgttactggctttggcgcagcctcactggagggacataatagcctagagtcattgcgtccgacattgcaaagtgctccatatattttgcccgaagatgcttttgaagaagcagttgagccctatcgcctagatgtattcatgttggctgtaattgcttatcgtatttgttttgcaggtgaatcattactgactcctggacagatgcctgaatggagagctccattaactgatccttttagcggtattctaaatagctggtttgagcaagctcttaaccttgagccaagtaaacgctttccacgtgcggacataatgctcaatgagtttaatgcagctactaaggaacatagccaagaatttgatgaagctaaccagatttatcaagaattaaagcaaaacaaattctttcgcgaagggatgaacagcgttggtgtgttaattgagtttcctccacttcctgaacagttgtctatggtttactctgctcttgctgctattgctacgactggcagcatcagttatcactgtgaacaaggtgggaaagctctgcaggtaaaattgtgggatggtgttattttgacccctcaacaacctggtgttaaccgccgtatccacgcttttaagcaacggatcgataagcttacgcatataaatctgccaactcctaaggtgcagtcctatggactattaggacaaggcggcttgtatgtagtgagcgagtatgtggatggcctaccgtggtcacagtttattgctgagaacgtgttagtacaatcccaacgttttacaattgcggaaaagttgatcaacaccattcatgcttttcatgaaaagcagttacctcatggagatctttgcccagagaaactgctggtacaagtcggggagcagacagtaattactctgattggattgcttgaattcagtgatgaattaactgcagataatcgctaccagccagagaatcccgaaagtactgatgcttttgggcgagattgctttgcagtatatcgtatggtggaggagctatttagtgaagatatgccagtactggtgcaggctgagctagaacgcgcaaaacaaaccgttgacggtatacctatcgcgctcgatcctttgctgcagtcaattcgagcaccggaacaagctgagattaatcaagttgtggcgtctgagtcacaggataaggtaattcctgtttgctggggcacagatgattggccgcaagaagtgaagcttctagaacaaaatgatgggatctattattttcaatgtaactggtcatctaacccacgctttgcgcatgaattgcgttgttacatcactggcctaggagagcggctattgatagacttagatcctgataatcgcactattaatagaatagtgtatgaaaaaggattatcgatcgaagaaagtataaaggctggtaaatattcccaggctaaaattaatactcaactttcattacaacgtggctcacttaatcagcgtaatacttttattgaactactgtttaacctcgagccagtaattgatgccatcattgagcgagctaatcctaatcaagagatggatgaagatgacttcgatagtagtgagtcaagcccaattgagttatggcaggcattatctgatacagaagtagacctacgagatatagtcaacatcgactctactgactttcaggaatcaccgagtggttgcttactctacccatatactacggaatccggtgctgacctcagctttgaacttgatgataagatcattgtttatattaaagataagcgtgaatcagtgcaattaggggaattgcagctaagtgagactacgccgagtctattggctattcgctttgattttgatgctgctcgtaagcgaattagtagcggcagccagctacaattggaatcgatccgtgacaaatcatcaagagagttgcgtcaaagagcccttcaacgggtaattgaaaacaaagcagagatccagcatctgccacagtattttgattaccaccagaaaccctgcatgcagcaaatgcaaccgcggccatccgcggagacattacgcgcactttatgatcagcctggacaacgttttaatgaacagcagctaatggcatttcaacagttggtcgagtttggaccagttggagttctgcagggaccacctggaacaggtaaaacaacatttatttcaaaatttattcactatctgtatcaacattgcggtgtgaataacattcttttggtcgggcaatcccatgcctctgttgataatgtagccatcaaggctcgagagctctgccatacgaaaggaatggaactggatacagtacgtattggtaatgaacttatgattgatgagggtatgctaagtgttgcaactaaagctcttcagcgacagattcagcataaatttcaccgtgaatatgatctgcgagttagctccctaggaaagcgcctagggatggccccattattagtccaacagttatgtcagttacatcgtacgctgaatcccttgatggtgacatatggccaatatagccgtgagctggataaagtagaacaaataaagagtagtagtattagtcatcaagagcgactggctgaattattagaacaaagcaatcagcttaaactgcgaacacaagaaattattaactcaatattcgatgacagcttgctgaaaactcttgtctatgatgaaaccttgataagacagttggctgagcaagttgccatacaatacaattataacaatccagagaaccttgaacgttttatgcagctattggaaatgagccaagagtggatggatgtattacgcggcggcgaggctggatttgatcgatttatgttcaaaagtaagcgattggtttgtggaactcttgttggtgttgggaatcgtcgactagaactagctgagtccagctttgattgggtaatagttgatgaggctggccgagcacaagctgctgaattgatggtagcgctgcaatcaggcaagcgggtgctgttggtaggggatcataaacaattgccaccattctatcatcaacagcatcttaagttagcctctaagaaattagaactcgggaaagggatcttttatgagtctgattttgaacgtgcttttaaagcaacaggcggcgtaacactcgatactcaatatcgaatggtagaaccaattggcgagttagtatcggagtgcttttacgctcaagatatcggtaaactgcattcatcgaggaaagtctcgccagattggtattccaagttaccaatcccttggaacaaaactgttacttggatcgatagttcgagccctaatgaagcaggtgcagaagaacataagggtaatggtcgttactataatcaacgagaagtccggctactgctagaggctttgcagtcattgtcgagtgatggctgcattgcacagcttgagcaaactattaccacagaacagccatatcctattggtataatcacaatgtatcgtcagcaaaaagaggaaattgacaatgctatcagtcgggctgaatgggctgcatcgttacgtggtttgatcaagatcgataccgttgattcatatcagggccaggaaaacaagataattatcctcagtctggttcgcgataatcccaacaaactacaaggtttcctgcgcgacgcgccgcgaataaacgttgctatttcgcgagctcaagaaaggttattgattctgggagcaaggcgtatgtggtcaaagaccaataatgattcagcacttggaaacgttcatgaatttattagtaaacaggttgcagtagatgaacccaactaccaaatcctgtgtggtcaaagtctgcttggagataacaactaatgtcagaaccacgtctgggtaatctgattaccgttttactacctgcgcgtagttacaagatcaactgcgctttgaccactgaaaaactgatgcctggaattgaacagtttgcatgtcgcttgctgctgatttttgatcaactctatcccagcgagttacagaattactttggtctaactgatcgtgagcgagaggtattgcttgatgggttgctggctaacagactgatcaacattaatcctgatgggcatattgaggctagctcattcctacgtaagcatgcagctaataatggtgggaagccaagtttagttaaatatcaagaatgtacggaggaagttgcattcgatctactaactctttcgatatgtaaaccgcaaccaaatcgtcgttttacttctggactgccagagctattgccgcggcatcagatcgggggagatgctgctgcggtaacagaggcttttagttcccagtttcggcaccatcttttgctcagccgcaacagcgagtatgagcgtcaacggactaaattatataagataatgggctgtagttcgcatgagatggtgcagctcccaatagagatagaggttagctacggtgtttctgctgggagcattgagccgcagaaatttactcgttcctatgaatatttaggtaacacccggctgccgctttcaaacgagctggaagctcatatcgcagattttttgggagaacataaactagatgaattcggtatcgactgtgaagatttctgtaaactagcaaatgataaagtgttgttacaatttgctaatggttataagttcaactattccggctggatagaggctcgtgaacaacgtaaaactggctacggtacttcattgactaccggcatgttaggggctgtttatttgccgcacaattctaagctgttcattagtatgttgcataatgcattacgtgattatataggtaaaacagctccaaaagcgctgtggtatagcagtaaagtaccactgtggggagctaatggtagtcaactttcgcgttttactcgcgctctaggcgatatacttggcaattatgccgatgataagattgctcgcatttcgcttttacactcaagtgcagatgaaggtgaaaaacgtcaagagcgtaagcggcacttaggtcgttttcctaccggtattggccttacttcagaggctaaatttgatcgtttggagatcctcttaattcctgatgtgattgctttggtgcaataccacggtcaacctaattctgatagtgcattaaccctgccgattggttatataactgttgagccagagcgtttagaattacttaaaaaactaatgattaagcgaactgaaggggctgttgcaaccattacttggtctgaatcaaaatttgaaaatttagcttcgctattacctgttgagtttctgattaaactgaataagaaaagcggtgaagatgtggatgctgcaataaaaaaaatgcagatctataaccgtgctgaaaccgcacgggcaattttatcgctacgcaagtagcatttatattgcaacgaataaatttttctaggttgctatgaactagctaaagggcaacaaatagataaacggcgttattcatgtcaaatgagataatgttaaattgatagggatttataccccgccggccattttgaatggtcggagttgttataaacgtta

SEQ ID NO: 51 - DNA, 3605 bp, Escherichia coli
cgtgatgaatgaagcggctaaatacattaatgataattataatttaattcattaaaatcagtaatatataaatataaaagttgtgaaatgtgatattcgtcaaagcatgtcaaaaagttttgactgttctttaggcatcattcgcaattgtctaacaacttgataggataggaacaatctcaaaaaggaaaatgacatatggcatacgaagctcaaatcagccgtactaatccagcagcatttcttttcgtcgtcgatcagtcaggttcaatgtccgacaaaatgtcttccggccgaagcaaggctgagtttgtcgccgatgctcttaatcgaactttaatgaacctaatcactcgctgcactaagtctgaaggcgtacgtgattatttcgaaattggtgttttgggttatggcggtcaaggggtttctaatggtttctctggttcactgggaggacaagtcctcaatccaatttctgctctcgaacagaatccagccagagtagaagatcgcaaacggaagatggatgatggagctggcggaatcatcgagacagcaattaagtttccagtatggttcgatcctattgctagtggcggcacgcctatgcgtgaagccctgaccagagccgccgaagagttggtgacttggtgtgatgcccatccggattgctatcctccgactatcctgcatgtgactgacggcgaatcaaacgacggtgacccggaagagattgccaatcatctacgacaaattcgcaccaatgacggtgaagttctgattcttaatatccatgtcagttctctcggaaatgatccaatcagattcccctcctcagacactggcttaccggatgcctacgctaaactgcttttccgtatgtccagccctcttccggaacatctggtgcgtttcgcgcaggaaaaaggtcatacggtcggtatagaatctcgtggattcatgttcaacgctgaggctgccgaactcgtcgatttcttcgacatcggaacccgcgcttctcagttgcgttgattcagcaatgaaactggagttcttagggacagttccgaaagatcctgaataccctaaggcgaatgaagataaatttgccttctccgaagatgggagaaggctggcgctatgtgatggcgcgagtgagtccttcaactcaaagttatgggccgatcttcttgctcgtaaatttactgcagatccgaaagtaaatcctgaatgggtagcatctgctttagcggaatattctgccacgcatgacttcccttctatgtcctggtcccagcaagcggcattcgaaagaggcagttttgcgacactaataggtgtagaggaatttgaagagcatcaggcggtagagattcttgctattggagatagcatcaccatgctggttgattgcgggaaactcatttgcgcatggcctttcgataatccagaaaaatttaatgagcggccaacactgcttgctacgctgtacgctcataacaatttcgtcggtggaagcactttctggacacggcatgggaaaactttttaccttgaaaaactcacccaacccaaactcctctgtatgacagatgcgctcggcgaatgggcactgaaacaagcgctggcagaggattctggttttatcgaattactttcgctgcaaactgaagaagagcttgcagagttagttctgagagagcgtgcagcaaaacgtatgcatatcgacgactcaacgctgcttgtactatcgttttaacgcggaaagtaaagatgccttacccatctcttgaacaatacaaccaagcgtttcagctacatagtaagctgctaatcgatcctgaattgaaatctggtaccgttgccacgacagggttgggtctccccctagccatcagcggtggctttgcactgacctatacaatcaaatcaggcgctaagaaatacgccgttcgttgctttcatagagagtcaaaagccttagaacgccgttatgaggctatatccaggaagatttcaagccttcgctctccctactttctcgatttccagtttcagccccaaggggtcaaagtcgaaggaatatcataccctatcgtcaaaatggcatgggccaagggagagacgctaggagaattccttgaggtcaacaggcgttctgcacaagcaatagcgaaactatctgcatcgattgaatcacttgccgcctaccttgaaaaagaaaaaattgcacatggtgatttccagactggaaacctgatggtctccgacggaggtgcaaccgtccagttaatcgactatgacggcatgttcgttgatgagattaagacattaggaagctcggagttggggcatgtcaattttcagcatccccgtcgtaaagcaacgaatccgttcaatcacactctggatcgtttctcactaatttcactctggctggctcttaaagccttgcaaatcgatccgtccatttgggataaatcaaattcggaactggatgcaatcatttttcgagctaatgactttgtagaccccggttcatcttccatcttagggatgctatcgggaattcaacagctttccacccatgtaaagaattttgccgcagtctgcgcttcagcgatggaaaaaacgccttccctcggtgacttcattgcaagtaaaaacattcccatatcgctagcttcgatcagtatgaatggggatattccagtcagcaggctgaaacccggttatatcggtgcctacaccgtcctgtcagccttggattacagtgcttgccttcagcgagttggtgataaagttgaagttatcggaaagattattgacgtcaaactcaataagacccgaaatggcaaaccatatatctttgttaatttcggagattggcgcggtaatatctttaaaatatcaatatggagtgaaggcattagcgctttaccttcaaaacccgatgcctcatggatagggaaatggattagtgtaatcggccttatggaaccgccttacgttagcgggaaatacaaatattcacatatctcaattacagtaacgactatcggtcaaatgaccgttctttcagaaccagatgcccgctggcgtcttgctgggccaaacgaaagtcgacaaacattaacttctactagcagtaatcaggaagccttggagcgcattaagagtaagagcaccacttcaactcctatgcccatgaacactaacgccacaactgcaaatcaggcaatccttaacaagttacgggcttctacgcaaactgtagcggcagcaagagcgcaaactcagcatgtagtacctaataaatcatcaacgcattatgtggcaccgacgggaacatcagcttcgcagccagttcaaaatattccgagccctgctagtacctcaaagcagcaaacctctcaaaaaaatatagttacaaagattttgaaatggctttttggatgattggtacttgtaaagaacaagcgcaatttcagtggccgtatcacttgcgcttgaggtgcctgcgggtatgatcttgcgacatacaccactaaaacgaattcgtggcggcacttttagcctgcccctgtgttttcccgaggatttac

SEQ ID NO: 52 - DNA, 11931 bp, Plasticicumulans lactativorans
ggggcgaaaaggggaatgccggtcattgccggacgagtgcaccttaaaatgtgcggcagggggcgcccgcgggctgatccatttggcagaatggccgtgcatgcgacgatcgagcgcgggagacggctgaccctgatggacaaacgcgctttgagcgagcgggacatctgcactaagttcatcacgtcgtggcttgacagatgtttgccttgaccggtcgaatagccccattcggggccgtgtactttgcaaatgggccgaggtgcccgaaaaaccggtctggagccaggacaagaattacagtgcgcgaaccccaccggttactcacagcccgcttattggagttgatcgaaacccatcccgaaggattgcgactcgacgaggttcaggcgcgtacgcgtgttgaagggtgtcgcgcgggagtcgatgatctcgcagcagcgctactcgatctccagcaccaaggtcttgcacatataaacgcagcccggcgctggtttccgaagcgggcggcgagtgtacgaccatcctccgcagtcactggttcggatgacgtggcgggtgcagggctggtgctgcaggcgctaccggcgcgcatcactggcaacgatatggcggtagcaccagcacctgcattgagtgctaccggcacctcgctcaagccgacttggggcctgttacgcagcctgctgccgtattacgccgaggcgctagcccgcaatgaacgggcgttgctactcggaacgcctgagcgctacggcgagcagttcctgctcgtggcaccacgcggccgatggtggccagcagcagggttaggctacgggctagaactctcgcgtacgcatctgccggttgcttttctcaccgcgttagcccgacgcacgcgcgaaccgattcatgtagcctaccccatcgcgctggtgcggccccgcgacgccgcgcgcagcccctttctgttaccagtggcaactgtggcagcggactggaccctcgacgccgagaaactgcgcctgaatctgccggcccaaacgccggcgatcgaatggtcgtgggtgcgcggacagcgccagcgcggacgccagattcgcgagttgctcgatgcacttgatgtcaatgctgacgacgaagtctggcgggcaggctccttcgtcgactgggcgaccttcgtcgatcgtctcgctgcaaccacccctaccgaggtgcgcacaccgctcgatctcgctcagcccaacaatgagttggattgtggccaggcgggcggtatttacggggcgttggggctgttcctgtcgagcgaattgcagttcgcgcgcggggcggtgcgtgatctcaagtccatgacgcagtggtcagatgacgagctggccacaacggcgctggctgcgtgcttcagcgatgccatccacaaggcaccgaatccggtcatcgttccggtgctggagccgcttgtgcttggcgaggatcagcttgcggccgtgcgtgccgggctaaacgatcggctgaccgtggtaaccgggccgcccgggaccggcaagtcacaggtcgccgttgccctgatggctagcgcagcgcttgtcggtcgcagcgtcctgtttgccagccgcaatcatcaggcgatcgacgcagtcgtcgggcggctggccgaagtagttgaagaccggccgctggtaatccgtgccaatgcgcgcgaaagcgatgacagcttcgactttacccgtgcgatcgaagccatcctcgcgcggcccggtggtgagaggcccggcgaagggctggctggctcgatcgaagtgctgacgcggctcgatgcggcacggaccgctgcgatcgaacaggccgccactgctaaccaagcgatcaacgaactcgggcggctggaagcagcgatcggagatctgacggcagcccttggcatcgacgcagccgctccactaccgcgggatctgcccgctgccacacgacccttgcatagttggctagagcgcctgtttgcgccttgggtacggtaccggcgactacaacggctacggcgtctagcgctgggatggggccagcttggttttggcgagtgcgacgaatcgacgctggagctacacgaacaacgtctactcgacctgcaggagctggctgcgctgcgggtcgagcgggatcaggcagaggcagccgtgcgtcaactccgttcaaccggcgatccgatcgcgctcggagagcggctgtgcgcttcatccaaattgcgtctgcaggggctcgccgaactgcttatcgagtgtgcgcctgaagatcgccgtgcgttgaccgcgttgcgcggcgatctggctctggcgcgcggtgatggcgccgccggtgctgcccgtgctcgggaactctggtcggctcagcgagccctgatcctcggccagatgccgctatgggccgtgtcaaacctcggcgcagccagccgcattccgctggtacccgggttgttcgattatgtggtgcttgacgaggcatcgcagtgtgatatcgcttcggctttgccgctgctggcccgggctcggcaggcgatcgtgattggtgatcccgcgcagcttacgcatatctcccaagtgcgccgggagtgggaagccgaaaccctgcgcaatgccggcttgatgaggcctggcatcggcagctatttgttctcgaccaacagtttgttccatcttgctgctgctgccgccggcgaccatcacctgctgcgcgatcacttccgctgccatgaagatattgccgactacattagtgccacattctacggcaatcgcctgcggccattgaccgacccgcgtagcctgcgggcaccagtcggacaggcagccggttttcactggacgaccgcgcccggtccgatccaaccagcccgcaccggctgctttgcaccagccgagatcgaagccatcgtgcacgaattgcattggttgctgggtgagggcggcttcactggaagcattggcgtagtcacatcgtttcgcgaacaggccaaccgtctacgcgaccgcatcgagcattgtttgagtgccgaggcgattgcaagcgcacgattggaggttcacaccgctcacggcttccagggcgatgcgcgcgatgtgattctactcagtttatgtatcggtccggatatgccggctggggcgcgagccttcctgcacgacacgggaaatctcgttaatgttgcggtgagccgtgcccgcgccgtttgccatatcttcggcaacctggagtatggagctcactgcggtatccggtatgtcgaggcactgctggcacggcgccatcgaacaggcgatgccactgccagtttcgaatccccctgggaagaaaagctctggcgcgccttggctgagcgcggtatcgagacaacaccacaatacccgattgccggtcgccggcttgatctggcattgctgaccgacagtgtgcgtctcgatattgaggtcgatggcgaccgttttcatcgcgacctcgacggtcggcgcaaggtgggtgatctatggcgagatcatcaattgcaggcgctcggctggcgggtcgtgcgcttctgggtttacgaactgcgggagaacatggatggttgcgtcgaacgcatccttgtccacatccgaagcaccgattactgagcatcaccgttccccaccagcagcagccgtgccaccagcgaattggcggcgaatgcaactcgtgctcgggctggccggggctctggcgctggctagcctcgtcactgtattggtgggtgtaatcggcgacgccaccgaacgcgagagttggcgagtacggcgtagcgagcatcaggaggtgctgggcgcgctcagcaccgcacgtgcccagcttgatgaggaagtcgccaacctacgccgtaatcgtgctgcgctcgatgcagacctgaatcgtctccggaccagcgccgaagctgagcagggcggcgcagcacggctgcgtgaggaagtcgccgcactacgccaggagctcgccgccggccgcgccgagttggctgtggctacgcagcggcgcgacaccctgcaggctgcagtgaagacggccgatacgacgctggcggaactgaacgcgcgccgcgatgaggccgagcgtcagaccggtgaggcagcagaacgccggcgggtcgcggccgaagccgagcgggccgcgaaggcccagcagagcaaggccgaacaagcccgcgacagtgcggttgcacagcagaaggaggctgagcggcgcatcgagcagatccttcaggacctgaaaaccgccgaagaacgagtaggtggactgcgcacgcaagaggctcaactaaaagcggctacaactgcctccactgccgaacgtgaccggctggatgctgaagccaagcggctcggactggagcttgtcaagctcgatcagcagcgccagcagcttgagcgcgatacccgtactaccgccgaaactcgacggacggccgaggggctccagcagcagctcgaccaagcgaaccgggatctcggtaccgtccgcgaagccctgaagaccgcgcaggggcagctagccgaaacgcgcggccagcagacccaactcgccgacgaactggcccggctgcgcgcacagaaaaccggcctggatggcgtgatcaccgcggctgctaacgctcaagcggaacttgacaaactgcaggctcagcagaaacgggcggagcaagcagcagaaacgacgcgtctcgatgttcgtcagctcgaatctcggaaaacggcactggaagccgacatcatcaaattcaccgccagcggcaaggatttggaaaagttccgtgccgaactggctgataccaatgcagaactcgaacgtctgcgtcagcaattggttgaggcacggagccggcgcgagactatcgcgattgaagtggaacgcctaacgcaacagcgcggcgaactggagcgcaccatcggttcactaacgccgcgagcgcaggaggccgaagcgctacggatccggctccagcaagacaacggcactttgctcgccctgcgcgagcagattgaacgcttgcgcactgaacgtgacagcttgcagcagccggtcacatcttccatgcatgtccccggcgacaacgccgcggcacgctgatcaaggatcgcgctgatggacacgaacaccctggtctggcttgcatcgggtggcacgcttgccggcatcgtcagtgttatcaccgcattggtgtgcggcatgcactacggtgcggcgctacgccgcataccggctgcggcctttttggaagatatcgtcgcacgcgtcgcaactcgtcgcgaggaactcgaacggctggatgcccaattgggcgagcgccacaacggcctccagggcctgcggggcgaaacggagatgctgacggcccgccgggatgccttggcagcgcaactgcgcgaactgcaggaggacctggttgcactcgatgggcgccgggccgacatcgcttcggtgcgcgatgagttggcggaagcacggacgcaacttgccatgctcgtcagtgaactgaccgaacggcggacgcagcaggagcaactcgaacgcgcggccgaacgtgcccgtgcacaactgtccctgctcgaagaacgccggagcgagatcgaggcaatcgatacagccgagcgcgaagcacggatacggctcaccgaggcgcagacggaactgggcaccgtcgtccaggcgcgggaagcggcacggcgtgaagccgaggcggcagcgcgcgacagggagatgctggcaacgaacatcgaccggctcaccgatgagcgcaacgaactgcgcgctgacatcgccagtctccaagccgaacgcaatccgctgtcgactgaagttcagggcctgcgccggcacttggagcagttgcatcttcagcagcaggcactcgacggcgatcttcaacgcctgcaatccctacagccggtactggaagataaaatcagcggcctgcaacaggaagttgttacccggaccgctgaactcaaagaccttcaggccgaacgtgatccgctgtcgactgaagttcagggtctgcgccggcacttggagcagttgcaccttcagcggcagacactcgacggcgatcttcaacgcctgcaatccctacagccggtactggaagacaaaatcagcggcctgcaacaggaagttgttacccggaccgctgagctcaaagaccttcaggccgaacgtgatccgctggcagcggacattgatggcctgcgtcggcaactcgaaccgctgcgtacacagtgcgacgaagtcgaagcggaactcgcccgccgccgcgccgaactcgccgcgatcgagcaggagatccgtaccaaaggcggtggtagcgtcggcaacccggaagacgtgctcgccgatctcgaacaggcaccggcttgtctggtcggcgacggcggcaggggaccgttgatgccgaatccgcagcgcgacgacgacgaaacagcaatgctcggccgcgtgcggacacaccttgatcggctccgtctgcactttcccgagcgcactctttatgcttttcatactgcgctcaagacggcaacgattagtccgcttacagtgctggccggcatttccggtaccggcaagagtcagctgccgcgccgctatgccgaagcaatgggtatccatttcttgaaactgccggttcaaccacgttgggatagcccgcaggacatgctcggtttctacaattatttggagaagcgctacaaagcgaccgaatttgcacgggctctggtgcatttcgacacgtacaactggccgcttgcccggcctttcaaggatcggctactgttgatcctgcttgacgaactgaacctcgctcgcgtcgagtactacttcagcgagtttctgagccaactcgaaggccgtcccgccccgggcgatcgcgatcctgagcacatccgcagttcggaaatcgtgctcgatactggcggcgttggcggaccgccgccacgcatctatcccggccacaacctgctgttcgtcggcacgatgaacgaggatgagtcgacacagacactttccgacaaggtgctcgatcgcgccaacctgctgcgcttcccgcgccccgaaaaactggccggagaaacgctggcgagcggcggcgagccggcggaaggcttcctgccggcctctcgctggcatgcgtggcggcgcagttttggcacgctgccggcaacgctgcgcgaaccagtcgaacgttggatccacgatctcaatgagcatctagacgggctgcatcgaccgttcgcgcaccgtgtcaatcaggcgatgctcgcctacatcgccaactatccgggtgtcgccgagccgatggcgcaaaccagtcctctggatcaggcccgcattgcctttgccgatcaactcgaacagcgcattctgccgaagctacgaggcattgacctgggtgactctggagtcacccagcacctcgaccgcatccgtgcgttgatcgacaacgagttgcatgatgcaacactggctcgcgcctttcagcgcgccgcgcaagatgacggcagcggcaggccgttcgtgtggaaaggcgtacgccgtgaatcgatatgatcccgctggtgctggctatgccatggggactactggcacagactccgatcgccggccagccgacgcgccgaccgttacatgacggtgaaacggtcgaactcgatgggcggtacggtgccatggtggcgctacccgagcggaccgacctgcaactgggcagtcggcgctggccggtgcaggtggaaggtgccgcctttgcctggttcgagggatcctttcggttggtgtcgctgccgactgcagccttgaccagcgaacgtcagatccggttcgatcttctaacggcgggcgagtctgtgctgagtgtcgggctcgtgttgcgtaatcatctactgcgtccgcgcggagccggacgtgacgatccggccgccgatgcattgcacacctttgtgttgcaggttctcgaccgcatccgtgaggccgaaccgtccggtgccggagacgattgggatgatctcggcaccggttgggcgcggctgcgcaccgcctggcttgagcgcgatgcgcagatcgaagaagcgcgccgcgatctgatcgtcgaacatgctgaacaactcccggcccacatcacagaaatcgctatccacccgcgtcgggtgctcaaacgcacccgcgagttgctgccgatcgatcgtatccaggaactcgacaccgcctgtctcgaatggctgatccggcagcccggcgttaccgttgccgaaaaggccggtccgcgccagcgactgctcggcatcgcgcgcgaggagcatctcgatacgctcgaaaaccgggtgctgaaagatttcctgcgtctgagcgtcgaggctgccagcgtctggcagcgggagaaccggcgttttcacaacagtgagcgcgcccggctggtcgggcgttatctcgcgctgtgccgcatgcatcatcgcgaactgtgcgcggctggcatcggtgaccccatgcccccggtcgctccgaatttcgtgctgcaacaagattcccgctaccgcgtgatctggcgcgcgtaccgcgaactgttgagcgctgagcagcgtatggacgatctctggcgctggcagtgtcggttgtggagcgacttcgctcggcttgtcgtggtgatgggggtgcaagagttgtgcgacaagccgagtgcgctctcgcccctcttcgtgcgcagggaacaggcaagcggacgctggtcggacacgctcggcctgctcggtgtattcctgatcgacctgaacggcaggtcgtatgtggcggaagtctgtgatgcgagccagttgccccgaaacgacacgtcacgagcgaagctggcgtcctggcagtatgcactcggttgcacagcactcatccgcctcatcgatttgtggagtgggcattgtgcgagcctgtgtgtctgggccatgcatagcgctacagccgagacgcttccgttgaccgagttggtcgcttcagccgatgaagccctgagtacggccatcagacaggaaggtctgcgcaacggcgagcaacttcgggcacgtggactggtgatccgctcggcgccgccgggaaagaccgagtacgccacccaggctgggcaggtctacggactgacgctggccatcgggtcggaacatatccgcgaggcgcttggcgagtgcactttgatcctgcaggacagtctggagcgcctgtttgcatgagcggagtgcacggcattgatctcaatggtgtgctcgattgcgtggtgcgcctcgatcgggcaccgcgaccagcgccgacaccgccggtgatcgtctccggttcaccacagggcctgctgacgggagccgcggcactgcaatcgccctgcggccgacctggcatggaagccgaggaaggtatccgcctgccagtgctggccctgctgcacgcgctcagtggtgaggggcggcacgatacgcacgatacggccgtgctgctcggccgacacctgcgtagcctgttgtccgatgatacgcatgctgctgtcgtcgcagtgcctgacacacctggtttcgacgaacgagctcgcacccggctgctggatggcgcgctacgcgccgggctcgatctgcacctactatggcgcccggtcgcagcgttgcttggttggggcgaaacactgggaaacggcgaactccaagccctgcacggccggacggcctgcgtcgtgcagttgttgccggacggcatctcgattggcgatttcggcctcgaatgcgtggtgcagggtggccggccgacgttagtaccggtgcgccggcgcgacggcgaacgtcaattttactcgtggagcggtggtggactggttgcactgctcgcgcgcgaagctggaaccgacgaagccagtctgtgggtcggaccgtgggtatggaaggtcttgcttgggcagcctgcagaacgcgaggtgctggccgacccgcatgcaccgggtggttggcgactcgccagcggtccttccacactgtgcggcgccttagccgcggagttgcgcacaggcctgcgtatagcactcggagccgcgcgctcggcactgcgcaatgcagcggtcattctgatcgaggggcctatcgccgatgcaccgctttcggacgcaatgcagccaacactcgcgctacgccagatcgtggctgcggaactgaccgtggtgctcggcccgacggtgtccgcaagactcgtcgccatgccgctcgccgatgctctaattgccagaggggccgctatctgtgctgcgcgtcaagcggcgcggcagatcacgtattacgatttcctgccgatgctcgaaatcaatgtgctgcaggccggagagcatgcgttcgttgaactcatcggtcgcgaagagcgcatcgcggggggcatgagttacacgaatacgttggccgatcgcttcaccgttgccgcaagcacgcgctcgctcgagttctacctgctgaaagaggacgaagcaggcgctcgtcacagcgaaacggtgctgccggtaccgccggcagccgacgtggaaatcagcctgcacgtcacgcagacacccgctcaaggctacgcacgcgtggagatactctcggccgtccggggcgcgctcggtgaagcaccgatcctgctcgattggtcagcgatgacagagattgaaggctcgcgcgaggatattctgcgcgaactcgaattcgaggggctcggctatccggacatcgtaccgcaacgtgcacatcacctgctctgggattaccagcgcagtgacggcatgactatcgctgccgcgatgcgggccttcaattgtaagcctatcctaagttcaccgcgcaaccagtacaatcaattggttaaacaaacgcgcgcactcgtcgggctgcgcagcaatctgttttttctgacaaagggcaccagttctgatcgtagtgcttacaccgccgtcgattcggatggccaattgccacctggaatcgcgccgacaatccaacaggaattcgaaaactttcgagtgcggctcgacacggattttgccgcaatcaccagcgtccgtaatcgacaagatatcgcaacccggcgtgaattggcgcgactgggcgcctgcttgtatgcagcgtgtcctaatgcaattgttcattacttccaacgcattgtcgcacgtagcgccgatgacctgacactggtgttgcatgccggcaaagtgctgagcaccgaaccagatcttgacagtcttttccattattgcgcgtctcgctacgatgaagccatccgcgctgtcaagagactgtcggtccacgtggtacgcgcggcaggcgatgctttggcttatcatgaaaaagctggaggcattcttgataaccgaagcgctgacaagttggctgaagctgcgctcctattgctaaaggaggaaatccaggcacataattacaaaatacgattccgtgccgccgcgcgactcggcctatttctgttacgccaccggcagcggcggcgcgatttcctgcatccgagtagcgctgacacggctaatcgtcggcgtgccaaagagttcgatgccctgttgatccaggctatcgcatcgaagcgccttaaccaagatctggaaaatgccttggaagaaatccgtgcacaaatccgatatcgcggtacaaatgcgatcgttgatatcgatcctgacgaagatggcgagattaacgagaacgaagtggagtagaggctgttgggcacccgctcgccatccctgtcgagcatcccggcttcgcgggcgcccatcccgtgcctttacggcgtgttcaacggccccggttcgccctgcgtatcgggctcctgctacgcccgtcgagacgcgctgcgcagactcgacgctcaaatggcttgacgccattctccctggctacc

SEQ ID NO: 53 - DNA, 4789 bp, Pantoea cypripedii
tcgcgatcaaggggtgagcaggggataaacgcaaagacattgaagttgaggagaatttagttgccttacctgcgaaaaatctgagcgatcttgcattaaagattttctatctcaggccgatgctcataagagcatttcctgaatttcaccctttttttgctcgccatccctctgcgaataaggacaccgcgccagatatgtcactcatcacccatacattagaaaacctcacaaaagccttgcgtactgcgttgcgtgtctcaattgaatgcaatgagcgcagcgaaaatacccataaaattttaaacgtgttacgtcaggttgagctgacgctgatgctgcatcaacaacctatctatgccattgccggtacgcagggagcgggtaaaaccactctggcaaaaagcctgctgggcattgacgatagctggcttgaggcgaatccgggacggggcgagcagataccgttatttattgagcaacggcacgatgttcagggtgattatccgcaatttatttatgtctgtgctcaccacaaaaccggtgaaatttttgacagccagccgcgcagtggcgatgagctgaaacagatgctgcgtgactggtcgcaaatggtgaatcaggagatagaagggggcaaaatcctctatccgaaattaatcattaataagtcagacagttttattgatgaagagatggtctgggcgctgttgcccggctacgagatcagcaacagccagaatcatcgctggcagggcatgatgcggcatgtcatggtcaacgccagaggcgtgttgctggtcactgacccgacgttaatggcaaatacgaaccagagcctgctggtgaacgatctgcgcagtgtgttcgccgatcgttctccggtgattgtcgtgaccaaaacagaaagcctgaacgatgcggagaaggccgaggtaaaagcgagcgctgccgcactttttcatgagacctcctcaccggtggtcgctgccggtgtcgataatcaagcgcagtggataggtgagctccgcactgcatttgctgagggtatccataatagcgccgcgtcagaagcggccgcgatcgaacgtttgatgactctggtcaatgacgatgttgcggatattattgataacctgaatctgctgtacgcggagcaggacagtggcgaggaacgtaccgtcgctattcttgaagcgttcgataaagcagccgagcgctatgaacagcaactgcgtaaagccatcaaacgagaaactgacgggcatcggcaaaaagccactgaatcttgccagcgccgttatcaggaagaagaagaagggccggtcaataatttaaaaggactcggtcgtcgtctgatgtttcagggggcggagattgatcgtgaacgcaaaaatcgggtactggacgcctggcaaacccgctttgagcagcaatctctggccgatcacaatatggtcgcgctggaaacgctcaaccgtcgtgagttgaggcattacggtctttcacaggagacgctgtcaccccaacggttgacctcgcccgcggcgacaatgggatatttgtcggtggctgaggaggataatttttcctcgctggcccctttgcgccatctgctgggatcggctgcaacaagggatgcgccgccgcagttagaccagctttccacggtattaaaagtgctgcctgccatgacgatggaatatgcgcgcggttgggtggcgatcaaccaggcgatgcccgcagcgtcagagctaaccagcgagttgcggccacaacaaattctcgacgcgatttttagcgcgcagagtagcatccacccggtgaaaaccgcgctgatggcgtttatcggtgccgacgccgcggacggcacgctggatggcgaagtgggcactccgcagaatgaagatagcggcgtatttacgcctgtcgcgatagcaggcaaagcgatgctggtcggtgcggcggtttatgcgttgtatcaggtggcgggcgtggtgagtgagagtgataaagctcaggcctggtatattgaacggatgatgaaggaactggcgcaatataatgaaaacgtcatcatcgagcgttatcaggacacgatgggcgatctgcgtcagctgattgaaatcaacctcaaccgtttatttggcgtgcaggatgtcctcacgcagaaaagctatctctggttagctattcagggactcacgacggtacaaaaggaagcccggcagtatgaagccagtatcaaacaatatctggcgtgatatttgccatgagcgttatcgatgggcggaaaatagctacatcaacctgctgcgtcaggttgatgccgagcggttaatccagcctcatgcagacatctcccgccagatatcggtcattgtctatggtccgacgcaggtgggaaaaacctccctgattctgaccctgctgggcgtcagggatgactgttttaaagaacttaaccagctgctgcgtggtgggcaggcattaggtcacgcgtcaacggcgcgaacttaccgttaccggatatcacgggatgatgcctggtattttagccacaaagaccagggaacaaccgcctggtcggatagcggggcggcagatattttcgccagcctgcgtgcagaggttcaggcgggcaggcgctactttgacagtatcgacgtatttattccgcaacgtttcttccatcctcagcagcggcaaaatggtttgttaatccgcgacctgccgggtattcaggctgcggatgacaatgaaagggaatatgtgactcagcttgccagccagtttattcgttctgcggatgtgatcctgctgaccggcaaagcggattatttaggctttctgaaacccgaggagttgggtaatgacctactggctgactggttctggcagccacatcgctacaaaattgtattaacccggacttttagcaacagttccattcgggaaatgttgcgccgtgtttcccccgataaatcctggctgcaggcttatttgtttgagcaaatcaatacgctggaattgcaacttccggcggagatgcgtcaacacatttatccgctcgaatgcggtcactcctggcaaaccctgattgaggggggtgacgattatgctgactattgccaacggttgcgtgagcagatattaaccgacctgcgccatcatatgttgcaggcggtccatccactttctcgtttacgtacgggatacgccttacctgaattaattatccgccaccgggacaagttgcagcagcagtacacagcgctgcacagcacgctggacaaagaacaggaatattacctgcgtaaaaaagagcagctgtcgtctgtgcagactgaatattcccggcatctggcaaagagccagacacgactggacagattgcagcggctacgggaacggctgaataaaagacaggcgcgcaacgcgcatcaatccatcgctgtgccaccgatgggcacaagaacggtcagtgccttactgaaaatgattgctgaggcaagagaagagatggcgcttcatccggcgttaaagcaccttcctgcccatttcgctgcgcaacagattaaccaccatgccttcacggcgattgagcaaaagctgcatggctatcatgcggataattatctctttgccagcaactataagcatgactatcaggaaacgatcaacgcgatcaaacaacacctgaaactgatcaccacattagccgctaatttccagcgtagtgagctggagagacacatcaaggaacatcgtcgtcgccagcaacgtttacaacaccacaccacccggcgagacaaactcctgacggcagtgaccaataagcttacgcgcatcaatacgcagcaacaggaattaacgcacagccatatgcgtgacgaggatcattatcagcagctgattggcgagagccgtcgctttcaggaactgatcagagtggcgaaaaatgaacgagccaccctgattgaacaacacattaggcgtacggatattggtcaggctgagcgactggcctggctactcgctgcccgtgcgttaaagaaagactacgaatatgtcagagcattaggagagtagtgcatgtcagtggaacatgacccggttattgcgcaggataatgacgagcggatgctggatgaattggtgcaggaactgtttctgaccttgctgacgcgtgagctggcgcaacagaaagcggttatcgaaaccattaatgacaacgtctcgtatcaggctggtgagtcattaaaatcgttgaaacgggagatcaaactttccatcagcaccctgtcgaatgcgcaacagcaatatcaggaagagcaggccatcgccagggaggaatacgagaagcggctggagcagcagactcaaacatttgccagtgatgcggaaaaaaatcaccaacagtcacagcagcagatggcagcacttcggcaaggtgagcagcagctggctgcacagttaacagatttgcagcaacagcatgccacacttcatcagcgctcaggtcagatgctgaatagcattaaatggctggtggtggggctggggggcgtcaacctgctgctgtttgcggctgtcatcatgatgttttttctcgggcatcgataatcatccgcgcatgcaggtttgtccggatatggtgcgcctggtgcaccatgacttttctctggcacggataaacggacgcacaggcagcgaatgacgcgccctgaataaactggcacaacttctgcattcatttcctcaggcttgtatacaaggccgcataccg

SEQ ID NO: 54 - DNA, 5216 bp, Pectobacterium wasabiae
cgcatctgtaatgcaaacttattagacttaatccctataatgcaatataaatcatattgttaccttgtggctcctttatctgattgcacggatttatccctcgcgtacttattcagcatgatatagctgggtatcatgtgcctactcttaacctgaatgaaacttacaaacgttcgtggtatccacatgctaagtgaggctgagatagcaaaatttctcatatggttgctgcccctaagatcaacaacgcactgagcatgactctctggacaaggtgccacacaccaggcgcacgtctaaaaggaaatatacatcaaatacctgattgctaagttataccaagtggaaatcgggtatagtaggtcaaaacgaaagcgtgtcttaacactgcatattaacgatcaggaaggtcttagcatgtcaattaatatcaatacgttgcataatcttcgtcgcgcgttacttactgcgctggagctctcgattgagcacaatgaagaaacagaaaatgtcgatcacattactgatgttctgcggcaggtggagttgacagtacttttgcagcaagaatccatttacgccatcgcaggtatgcaaggggcaggtaaaacaaccttggcgaaagcgatccttggtattgatgatgaatggttagatgccaatccgggtcgtggcgaacaggtaccgctttttatcgaacaggtggatggcgatccctccgattttccacaagttgtctatcagtgcctaaaccttaaaacaggcgaaattgctccgcaaaagggcgagggtggggagcaacttcaaagtctgcttcgcgattggagcagtattcgtcgttatgaaaaagcgggctttaaactgctctaccctaaattgctgatcagtaaaaaaaactcgttcatcaatgagcaagtgacttgggcgctgttgccgggctatgaggtagccacaagtaaaaactatctctggcaggatatgatgcgccacgtattggttaacgcccgtggtgtcatgttcgtgaccgatccctctctcttagccaatgacagcaaatccgcagtgctgcaagatttgcgagataacttcaaggaacgcggcccagtggtggtcatcagcaaaacagagatgctcggagaacatgaaatcaaacagctcaaaaccagtgccgctgaacgtgttttccccaatgttgggatgaaaaaagaggatatcgtagctactggttctggtaataacgacatctggattgatgcactacgtgacacagtcatcaataagctcaccagcagtgcggtatctgaagcaattgcactagataacttcatgggacttatccgcgaagacgtggccgaaataatcaataatctgaagatattggcggatacacagcagcatcacgaatccatagtggatgagatcctagacgttttcgatgaatcagcctccacccatgagcaaaaattacgtgaagcgatcaaaaaggagacccgtcagcactttactgatgcgcttaagtactgtgaaaaaagctataaaagagaagaggtaggttttcaaaaaaacctcaaaattttcgcccgccgactgtcgtttcgcggcatagaagtggatgatgagcgcagtcaacgtattatagatgcttggaatagacagtacgaaaacatcagtattcacgaacataatttcgacgcactgacgtctgtgaatacccgggtgctgcgtgccaaggggctattgcctgtcgttgaaaatcagcaactattaccgggcagcgcagtcgggagaatggggtatctggttcaggataaacaagcagagtactcaataatggatcctgacctgatgacgggtttgtatacactgctcaaaaagccgggcggcgctcatcaagcaccgccgcctaaaaaactcgctgcggcgctggagattatgcctgctttaatgctggaaaacgctcgtactaggttggcaatgcatcttgacccggcctgcacaacccaactggcagaggagatccagcctaaacaaatttttgatgcgctcttttcgagcagagaacagtaccatcctattaaaacagccatgatggcgtttttgggtgctgatgcggcagatggaactgtagacggtaagagcacgccaaataccgaggggggattcgctccgctagcgctggtaggtaaagcggcattggtagcaagcgtggcttatggcatctatcaactaacaggagttattcgcgacagcgataaagcgcagatttattacattcgtcgtgtgatggaggaattgtcattccataacgaacagaccgttattggcaattataaggagatgattggcgaattgcgtgattatattgcgtataacctgaagcaaatatttggcgaaacggatgccctggcaaatcgaagcgccttgacgcttgccattaaaaatcttgttgccgcacaaaaggaagcaaaattgtatgaaactcacttccgaaaaatcctgggctgatctttgccaggagcgttatctgtgggcggaagagagttttgtcacgtttctacaaaaatttgacgcacagaggttgatccagtcggcagacaatgccaataggcaggtttcagtgatcctgtacggtccggcccaagtaggtaaaacctcattaatcctgaccctgctgggtattcgtgatgactgcttcaccgagctcaatactttgctacgcggcgagcaggggctgggcacaatgtccacggctcgcacctatcgctatcgcatggcgaaagatgacttctggtatttcagccatagggagtacggtgcaactcggtttagtgacaaggaggcgaaagtcatttttgcagattttcgtcaggctgtggagcagggcgagcgtgaattcgatagtgtggatgttttcctgccgcgccgtttttttgatccgaagttacagagcagtgcccagttgctgatccgtgatttacctggaactcactcaaccaacgccaacgagcagtattatgtcaacatgcttgccagccgatatcttgcttctgccgatgtggtactgctgaccggcaaggctgatgcgttggccttccttaagccggaagagttagacaatgctctgctgaacgactggcactggcaacgccaccgctacaagattgtactgacccgtgcttattcagatgccacactccagcgttttatcaaacaaaaacggtttgataaaaaagcaatgcggatatttttgcttcaacagattaataccatggatctgggcttgcctgaaagcatcagtgaactgatttaccccgtggagtgcggtcattcttggctggcaatcaatgccaaagatgacgagtttgcccgccagtgccgtgatttgcggcgagatgtattgcaagatttactcgactctctgcaccaggcatcgaacccattatcacgcttacgttcgggatacgcgctgccacatatcattaaacagcagatagctgtcgaaaaagagctttacgagacggaaaacgcattgctgcaaaaacagctctctcggctgggggaatatgttgatatgtacgagaaacgggtcagcagtaatagagataatcacctgaggttacaagtaaagctgcaagcactattacaaaaacgtgaggacgcgttgagtacagattttcgtgaacattcgaatgcgtttcaaataatttcgcaatcatctctcggttatcttaagtctcaaatttatgcatctcgtgaaacaaataccaaacgctggaacgatctgctggaaatctaccagcttccacttgaaagagtaccggagatgcccaatctagagcgggtcttaaaaagactaaacggctacttgtttgagacctattttcgagagaaaacacgtcagaatgatcagtatgagatagaagaggcaggctttaaagacgcaaactgcttaacgtatattttccacgaacgaatcaaggttaagtttggtgccgaagagcgcgccttgaacaataagatagccaaaaacgagcgggcagcgtgccgactggtgcgtatcgttgaacaattgtcgaaaaaaatggtgcacacgcagtcaagactcttccagatcaagcaggagttaggcgtatcgttaactctttattttcagagatataaagagagtaaaaacttttcgaaagtcattgtttcggcgaaaaatactcgagcgcgtgaaatcgaatgcaacgctaaaaaaccgaatattacacgcagcgagcgtctcgcttgggtgctgatgtatagagcgttaaagaatgattttgactacgtaaagtccttagatgaggagagcactaaagttgaataaaaatcttgctgtcgcggaagtgtccagcgatgagcagttactggaccaactggtgcaggagctgtttttagagcatttgcgacgtgaactgggtgtgcagaagaagagtattgacgacagtaatgacaaactctttaatctcgaccgaaaatttgtcgctgaatttaaaaacgtgagcggattgcttgatacgatatccgacactcttggcgaacagactcgtgaactgaatgatgctaaagctgatgcccaaacacattatcgttctttgctgaatagtttggcacagaaccgaacggacaccgctgctctgcaagatatactccagcaactaagtagtaagcgtcataaggaacaaggcgagcaactgcaacggatccaggaacagttgtttcatcagagcgctgaactccaagcgcaatactccgtgttgacagaacagaatgcagtgttaaaccagcagcaggaggtccttcagaaacaacggttcactgctactctggccgaaatgcaagagcaaaacgtgacgctggcgtcacttacggaacagaataagtcgctgcatcgacagtttctcaccttagaagatgaacaacgtgcagattttcggacaaatagtcgctggggtaagcttgccgctggattctccatagcgaatacgcttatcctgataagcgtgaccgcactgtttatagttaagtactttctataaagaacccgcgtgcacaactcttcttcatataaaatatcttttccaacagatattgcattgaggatttcttttattgctgtttatgaaatggctaaatatcctccgacaaataagaacagtggcggatttttcatcctcgtctttttcagggag

SEQ ID NO: 55 - DNA, 4577 bp, Escherichia coli
atcagggcaaggaccgttgcccatatgtgactggttttggtgtcggctatgtggccaggctgcgtgaaagctactgatcgctttttaatctaagtggtggatttatatgatcaatcattattgataaactcatgaagaaacctaatttatttaataaaattaaaaagtatacgattagatattgcgggtgtagatatgactcaccacattaaaggtcaaggcagacatcaggtgacgttgctctctgacgtgcttgatgattttgtcacagaagataaaaacacgttgaagagagaaaaatgaataccgcagaagactttaaccgcctctatgccgacgtttcacgcaatattcagcagacgctgactgatatcgctgcacttcatgttgaaaatgaagagggaaagcagcagctacaatcgatggtcactcagttgcaatccctgcaggatggctttaaccagaagctcacgtggctgcaaaagcatgccgaatgggacaaatttaccctggcattctttggcgaaaccaacgccggtaagagtacgataatcgaatcgctgcgcatcttgtttgacgaagaatcccgccgccagctgctgcaaaaaaaccacaacgacctggaaaaagccgagctggaattacaggaaatctcggaacgactgcgcagcgacttagggcggatctatagcgatgtagtggataaaatcaccgatatcagtttttccgctctgcgtctgatgcaaattctcgacaatgaaagcgccctgcgtcacaaacgggaagaggaagagagcaaggaacgcctgctggttgaaaagacggaaagccagtcgcgattgcaaattctgcaaaaacacaccagcgccaaaacacgattaaccctgtgcattgccgccgtcatctcttttgtcgcaggcgcaggcgcgagcgccgccgtggtgttcaatatgatggcggggcaataggatgagtaacgcactagatcttcaggctagtaccacgtcagtacgttcgcaacgaaagtcctcattgaatattcaggagctcctgaataaaacgctgcctcacctggttcagaccataatcaggaatgagagattaaaaaacaccctacttcaggttgatggtctcattatcggtaccggcgaggcggattttaccaaagggaatacccgctacgccttacatattgacgataagaccttccatctgctggacgtacccggcattgaaggcaatgagtcacgctatatcagccaggtgaaggaggctatcgccgaagcgcatatggtagtgtacgttaacggtaccaacaaaaagcctgaaaccgccaccgccgaaaagatcaaatcatacctcgaatacggtacgcaggtttatccgctggttaacgtgcgtggatatgccgacgcctatgaattcgaagaagatcgccacgatctgatgcagcaaggaggcgcaggagaagcgctgaagcaaaccgtcggggtactgcaaccggtgctgggctccgatgtgctgcttcccggtaactgcgttcaggggctgctggccttctgcgggctagcctatgacgatgcgacgcaaagcaccactatccacccctcgcgcgcgcacaacctcgccacgcaacagaaacgctatttccagcacttttcttctcgtcgggagatgcaggaatttagccagattgacgccattgcccgcgtcattcgcggtaaagtcgccacttttcgcgaagatattgttgaaagcaacaaaggcaaagtgcgagagtcactgggtcagtatctacaggtactaaacacgcaactcaccaatcatcgcgcatttctaaagaaaacagagccggaatttgacaaatgctgcgtcgcctttgctaacgccattgcagcctttgaacgccgaatcatcaataaccgccgtaaccgctggaacgactttttcaatgatctgatggaaaaaagcgacgacattgttgaagacgattttggtgataaagaggcgattgcccagcgtattagccagcagtttaaatcgcgtcgcgtcgaggtgaaaaaattaatgctccaggacactgaggagggcgttaaggccttacaggagcagatgattcaagcggtggctcgtttgttgcaagatattaagcacattgagttccagcagcatgtcgatttcgcccacggcggtgaattcgaatttggtcgcgagatcgcgctgggttatgaccttgggttaagggatttcggctcaatggcctttaaaatcggcagctacgccttaagcggcgccacagtcggtagcgccttcccggtgatcggtacggccattggtgccgtagcaggcgctttagtcggcgtcgtcatgaccgttgtcggtttctttaccagcaaagcgtcgaaagttcgcaaagcgcaggggaaagtgcgcgacaagctagaaagcgccagagataaagcgctggacggtattgatgatgaggtccgtaacctggttgcggctatcgagaatgaactgaaaagcagcctgctgcaaaaagtgaatgccatgcatacggcattgcagcagccgatcgccattttcgaacagcaaatcacgcaagtcacccatttaaaaaatcaactcgagaacatgccttatggaacaattcaaacagttcagtattgagaagcaggctgccattaactcgctgctacagctgcgcggcatgctggaaacgctgggcgaaatggagatcgatgtcaacgacgatctgcaaaaaatcgcgtcggccatcacagccgttgagtccgacgtgttgcgcattgccctgttgggggctttttcggacggtaaaaccagcgttatcgccgcctggctcggcaaaatcatggaagatatgaatatctcgatggacgaatcttctgaccgtctgagcatctataagccggaaggattacccggagaatgtgagatcgtagataccccggggctgtttggtgataaagaacgagaaatagacggcaaacaggtgatgtatgaagatctcaccaaacgttttatttccgaagcgcatctgcttttttacgttgtcgatgccactaatccgcttaaagagagtcacagcgccatcgcaaaatgggtgctacgcgatctgaataagctgtcatcgaccatcttcatcatcaacaaaatggatgaagtgactgatttaaccgatcaggcgctgtttgcagaacaggcggccatcaaaaaagagaacctaaagggcaagctacagcgcgcggcaaacctgaatgcgctagagcttgaacagcttaatattgtttgcattgcttcaaatccaaacggtcgtggccttcccttctggttcaacaaacctgaacattacgaaagccgctcacgcatcaacgatctcaaaacagttgccgctgagattctgaaaaccaatgttcccgaagtgctgctggcgaaaactggcatggatgtggtgaaagatatcgtcacccagcgtatcaccagcgcccagctgcatctcagcaaactcagcacgttcgttgcgaaaaatgatgaagatacttcgcgttttacatgcgatatccagcaaagccgtaacgaggtcaaacgtctggctggcgaaatgtttgaagaacttagtttgctggaaaagcagctgatgagccagctacgcccgttggagctggatggcattcgcccctttatggacgacgaactgggctataacgatgagggcgtcggctttaaattacacctgcgtattaagcatattgtggatcgcttttttgcgcaatcctccgccgtcacgcagcgactgtcggacgatattactcgtcagcttaattccagcgagagcttcttaagcggagttggcgaaggggcatttaaatccctcggcggcgtgtttaaagggatttccaaaattagcccggagacgattaaaaccacgatttttgctgcacgcgataccattgggcaattaacgggctatgtctacacctttaaaccgtgggaagcgaccaaactggctggcggcatcgctaagtgggctggtccggccggggccgcatttaccatcggctctgatctatgggatgcctataaagcgcatgaacgtgagcgagagctggaagaggcgaaaaatgagttgacccggatgatcaaagatccgttcagcgatatctatagcgtcttgagttcagatgaaaagacgttcgctttctttgccccccagattcaagagatggaaaaagtcatttgcgatctgacagaaaaaagcgacaccattcggaagagccagcaaaagctaagcatactccagcagaagctcgagcagtttaaccgttcgagcgagcagcaagtgtcctgatacacaaacggcagcccgcaggccacgtttagttataaatcaaactaaacgtggccaggtgacatgccccccgttgattaacacacgttatcgtcgggtggaaaggacaacctcctacgtccgcttcacagcggacactcaggtttaacagtccagtacgtttagcttacggataaatcattttatgatgatgtggagaatgggggat

SEQ ID NO: 56 - DNA, 4212 bp, Escherichia coli
tattttgcgtagctagaacgcaatcaaatctagcagtccgctttgttcggagttcggacattatgagttggcaagtaaagtagcttgctaggaagccggatttgcacggtcggtataataagatgtaaccccttgccttcatttactcgaatgaacgtgcacattggataggaggaaaaggaatgcaattcattaccaacggccctgatattcctgatgagcttttgcaggcgcacgaggaagggcgcgttgtgttcttctgtggagcaggcatttcctaccctgctggtttacctggtttcaaagggttggtagaactaatttaccagaggaacggaacaacactttcagaaattgagcgtgaggttttcgagcgtgggcaatttgacggcacattagatttgctggaacggcgcttaccagggcagcgtatagccgtccgacgcgcgttggaaaaagcccttaagccaaagctccgtcgtaggggcgctattgatactcaggcggcgctgttacgtttagcccgtagccgcgagggtgcccttcgattggtcactaccaactttgaccgtctctttcatgtggcagctaaacgtacaggccaggcttttcaggcctatgtagcgccgatgctgccaattccaaaaaacagccgctgggatggacttgtatacctgcatgggctgttaccggaaaaggcggatgatactgccctgaatcgtctggttgttaccagcggtgactttggcttggcttatctcactgagcgttgggcagctcgctttgtgagtgagttatttcgtaactatgtggtctgcttcgttggctacagcatcaacgacccggtactgcgctacatgatggatgcgcttgcagcagatcggaggctcggtgaagtcacaccacaagtatgggcactgggggagtgtgagccggggcaggagcaccggaaagccatcgagtgggaggccaaaggggtcactcctatcctttacaccgtaccggcgggctccactgatcattcagtgctgcatcaaacgttgcacgcttgggcagatacttatcgagatggtatacagggcaaaaaggctatagtcgtcaaacatgctctggcccgcccgcaggacagcactcgtcaggacgatttcgttggtcggatgttgtgggccttgtcagataaatcaggtttaccagcaaaacgctttgcggaactcaatcctgcaccgccgctggattggttattgaaagctttctcggacgaacgatttaaatacagcgatctgccacgcttttgtgtatctccgcatgtcgaaattgacccgaaactccgattcagtctggttcagcgtcctgcgccctatgagctggccccgcagatgtcgctggtttctggatgtgtcagtgctagcaaatgggatgacgtaatgtcccatatagcccgttggctagttcgttatctgggcgaccctaggttgatcatatggattgctgaacgcggcggacaaatacacgaccgttggatgtttctgattgagagcgaactagatcgcttagcagcactgatgcgggagcgtaagacttctgagttagatgaaattctcttgcattcccccctggctattcctggtccacctatgtctactttatggcggcttctgcttagtggtcgtgtgaaatcgccattgcagaacctggatttgtatcgttggcaaaaccgcttaaagaatgaaggcttgacgactacattgcgcttggagttacgcgggttgctttctcccaaggttatgttgaggcggccgtttcgctatagtgaagacgattcgagcagcactgatgaacccttgcgaatcaagcaattggtggattgggagctggtgctgactgctgattacgtacgttcaaccctgttcgaccttgctgacgagtcatggaaatcgtccttgccatacctgttggaagattttcagcagttgttgcgtgatgcactggacttgttgcgggagttgggagagtccgacgatcgtcacgaccgctcgcattgggatttgccgtccatcactccgcactggcagaaccgggggttccgcgattgggtgagcctgattgaattacttcgggattcatggttagccgttcgagccaaagacagcgatcaggcctcgcgcattgctcagaattggtttgagttgccatatcccaccttcaaacgtctggcactgtttgccgcaagccaagacaactgcataccacctgagcggtgggttaattggttgttagaggacggttcatggtggttgtgggccacggatactcggcgagaggtattcagactgtttgttttgcagggacgacatctgacaggaattgcacaagagcgtctggaaactgctatcttggcagggcctccgcgcgagatgtacgaggataatttggaagcagacaggtggcattatttggtggctcattccgtctggttgtgtctagcgaagctcaggggagcgggccttgttttgggagagtctgcggctacacgtttgacggaaatatccacagcatacccaaaatggcaactggcaaccaacgagcgtgatgaattctctcactggatgagcggaaccggtgatccaggcttcgaggagagtatagatgtcgacattgcgccccgtaagtggcaggaattagtgcaatggctcgcaaagcctatgccagaaagactgcctttctatgaggacacttggagtgatgtttgccgtacgcgcttttttcacagtctgtatgcgttacgtaaactatcacaagatgatgtgtggcctgttggtcggtggcgtgaagctctgcagacttgggctgaaccagggatgattttgcgttcgtggcggtacgccgcaccgttggtgcttgacatgcctgacgcagtacttcaggagatttcccacgctgtcacttggtggatggaggaggcttcgaagaccatcctctgccacgaggagattctactggccctttgtcgtcgggttctgatgatagaaacaagcccagagtctagcaccattcgaaacggaattgagacctatgatcctgtttctacggcgatcaatcatcccattgggcatgtcacgcaatcactgatcaccctatggttcaaacagaacccgaatgacaatgatttgcttcctgttgaattgaaaacacttttcaccaaattgtgtaatgtacagatagagctattccgccatggtcgggtgttgctggggtcgcggctgatcgcattttttcgcgtagatcgaccttggaccgaacagtatctattgcccttgtttgcttggagtaatcccgtcgaagcaaaagctgtgtgggaaggcttcctctggtcgccacgcctgtatgaaccgttgctgatagctttcaagtcagattttttggagagcgccaatcactattctgatcttggcgagcaccggcagcaattcgctattttcctgacttatgcagctctgggccctaccgagggatataccgtggaggagttccgaacggcaattagtgctcttccacaagaaggtctggaggtagccgcgcaggcgttataccaggcacttgaaggtgcgggcgatcagcgcgaggagtattggaaaaatcgtgtccagccattttggcaacaggtttggccaaagtcccgcaacttggccaccccacgcatatccgaatcgttgactcgtatggtgattgctgcccgaggtgaatttccggcggctttggcagtggtgcaggactggctgcaaccgctcgaacaccttagctacgacgttcgccttttgctagaatcagatatttgcagccgatatcctgcggacgctctatccctgctgaatgccgtgattgccgaacaacactgggggcctcgagagttggggcaatgcttgcttcaaattgttcaagctgctccacaactggagcaagatgttcgttatcagcgattaaatgaatattctcgaaggcgcagcgtgtgaaagtgacaggcgttggacagtgcgaactgtggagcctaacaaggtaaagacactctaactgataatgctgcgccgctcgtgcaatgcaatacagtttttatctagcggtgaattatggtgttaaaagttagcccctgacacagggtgggtagttggctctgtgtcattgatgggtattagttctgatatgagctaataccca

SEQ ID NO: 57 - DNA, 4329 bp, Cronobacter sakazakii
gtaagacaagggttgagcaggctactaatcgttacacaggctaacaaaggcatattaagacgatttgtagcgctgtaaccttgaaaattatgtacaagcgccccgcattacgtcgttttaaaggccatcggattcaggcccgacgcggcttcacgcgattataaccgtgaaaaatcccccccgcatagaacctgaattatccccgccgccgcgcagaactgacagcgcttcagaaccgttaaccctctcagaaatcccgcttttttactgtaaaaaaccatgcataaggtgcatggttttgcatgcgtttcaccgacactgaatcccccgccagcgccagcagtagcgtgccctgaggccgttaatgcacccgtattaaaagcgccctgttaagcgagcaggcggggcggggcgagcattgcgcgtcggtgttaccaattctatatggacattgagcaattcaaatataataaaggttgggtatatttcgtcctcaacgatgtcaaaaactgcaaaagcgtattataattcagatcattttcagaccacctattttaatcatgcatgcaaaatggaatatgtgatgacaaataaaaacaaaatcaaaccattattaaataatatatccgctcgcctttgggatggtcgtgcagctatattgataggagctgggttcagtcggaatgcaaagccattaacaagcaaggcaagaaagtttccaatgtggaacgacttaggtgacattttttatgaaagtgtttactgcaaaaaaaacgacaatagatattcaaatgtattgaagctaggagatgaagttcaggctgcatttggtagagcgacacttgataaattaatcatggatcatgttccagataaagaatatgaaccatccaaattacatgtttcccttctttccttgccgtggattgatgtttttacgactaattatgatacattacttgagcgagcaagtgttaatgtcgactccagaaaatatgacattgtccttaataaaaatgatttaatgaatgctgaaagaccaagaattataaaactgcatggtagcttcccatcagaaaggcccttcatagttacggaggaagattacagaaagtatcctttagaaaattctccttttgtgaataccgttcaacaatcattgattgagaatactctatgtctgataggattttcgggtgacgatcctaacttcttaaattggattggttggataagagataatcttggcacagaaaattcacccaaaatatacttgatcggtcttttttcatttaatgaagcacaacgtaagcttttagaaaaaagaaatatttccattgttgatttaagttttctaggtgattttggcaaggatcattatctagcacaccaacgctttatccaattcttatacgaatcaaaaaatcgagacaacctaatagagtggccaatagaaaccaattatgacagaattgtttttaatgatggcattgaattaaaaactgagaaaattaaaaagtgtatcttagaatgggctcagtcaagacaatcatacccgaactggcttattttgccggaatcaaacagaagtaatttatggcaaaacactatagattggttatctgttgctaattatgatgtcgcttgggatggttctgatgatcttgattttggatatgaaattacatggcgactaaataaagctttgctaccaattttcaatgatacatcagaattcttatttaagttgattgaaaaatatgagatcaattacgtttcggggataaataataaaatcattgactttgatgaaaaatactctcatataaccctcagtttaatgagattctgtcgacaagaaaaccttattgataaatggaagaatctaaacgatttattaattcaaaatcttgatcgattaacaccagaggtaaaatctgattattattatgaaaatatattattttcatacttcaatttaaacttcgatgaagccagaaacaaactctccaactgggaaacgaataaactcctcccccatcatgaaataaaaagagcaggattacttgccgaatttggaatgcttgatgaagcaatcaatcttcttgaagaaactttatctacgattcgaagaaacagtttgctttcatctagaaacattgactattccagtgaatctcaagaagcatatggaatctatattttgcgaatgtttaaacggagtttgcgtttagatagcaaagatgacgattattcatctgagtataactcgcggttggctacattatcacaatatcgcagcgatcctgaaaacgaaataaaatacctagaaattaaactagagtcactaccaggtaccttcaagaataccaatgacacggatttcgatcttaacaaaagaacggtgaccacttatttaggaggaagcccaacagaagtgaggtcattagatgcttttagtttctttctactggcagaggaacttggcctccctttccacataccaggaatgaacatttttagtggaatagttgagaatgcagctcgacatatttatcaatactctccagagtgggctattttttcaatatttagaacatttaacaaggataaggccaagagtctattcaatcgaaatagaatttcgtctcttgagcgaaaaaaggttgaagatttatttgatggatactacaaaaaatatgagcaaattatcacaaaaaaaatagaagatagattaaacgataaacttgagatagaaatttctacgctatcaatcattcctgaaattctttcccggctagttacaaaagtatcatttaataaaaagaaagacattattcaccttttgcttaaactgtttaactcggataattttcatcaatacatggagactaaagatctattaaagcgcactatttccaatttgagcgacttacaaaagatctcactaatagatattttcattgatttcccctccgcgcctcccaatacccaattacatatgggtcaaagatacaacttccttactccatttgaatgtctattaggggttacaataacccccccaaaagaaaactctaaaaaaatcgcatctgcaaaattaaaaaaagatataaacgatttaaaaagtgataatttagacttgaggaaagctgtatcacaaaagctcataacattatataacctagaaatgcttaacaaatctgacacgactaaacttataaaaaacctttggtcaaagcgtgataactttggattcccaataggcagtggttactataaatttttctttataaacaaccttaacccagataatgaaaatatagccgacaaattcatttctataattaaaacatacaaatttcctgtgcaagaaggaaaaagagttagtattacaggtgggttagatgagtattgtactgaactcaatggagcgctacaccatataagtcttccagagaaaaccctatctgaaataatttcaaaaatacatgactggtatgtcaaggatcgggcctggcttgaaaaaagagatgatttagccaaggagttcactcttagattcagaaatatcacaaatatcataacgacaattttagaacaccataaggacaaattacatgctgaatctataaatgaaatatcaagcctactagataaaatgaaagaagacaagatacctgtaaactcagcagtaacaatgctttgtctgaaaaataaaagcacttacctcgagagaataaaagatatagagaatggactatatagctttaataaagatgatgttattgaagctatcaactcaacttatgtctttattagaaacaatgaatttccactaaccatcattcaagctatcagcgataaaatcgcatgggatagaaaccctcgccttcctgattgctacaatttaattgcatatataattaactcgtgtgaatttactcttccagattatttaatagagaaaatccttcgagggctggcatatcaaataaacattgatgatagagattttgttgataacaatgaatatttgaatcaccttgagaaaaaacttagtgcaacaaagctggctgcttctatgtttagaaaaaatgaaacactaggtattgaccaaccttctatcattcaagagtggaaaaacatgtgcaactctagaaatgagttcgatgaaattaggaatgaatggaacaacaatatataaataaaggaagaacacccaatttatattgggtgttctgttcacgaaacccttttaccataatcgaatggcaatataaattgagattgaaatttattctcatctaattaatcagcccaccattg

SEQ ID NO: 58 - DNA, 3411 bp, Escherichia coli
actagctaagcaataagggcgatcggctctcccatagatcgaggccgaatgatgttagcaatgttcactcttggctggaatctgccagaaatcgaggtcatatggtctgctttgagtgaggagcgcaaatggataaagccctcatgagttctttttcaatgacctaacttttgagaggcactgggttagatcatgtttcatgtttgcaatacaatatatatttaaacttaggtttataacttaaatgttagttcctgatctaaaccagattattaatcactcctagagtgaaatgagttaagccaagagttgataaaattaacagttttttttacaatatctggatgtttgctagcgaacaggcatctaaaataactatgctgagctaaacttacaattcaaattgtaccgaggataaaatgcaagtacaacatcatactgaaccaaacttgaagaatgagattgtggctttatttaaggcttctcaattgatacctttttttggcagtggatttactagagatattagagcaaaaaatggtaaagttcctgatgctattaaatttacggagttgattaggaatatagcggcagaaaaagaagggttaacacaaacagaaatagatgaaattctaagaatcagccagcttaaaaaagcgtttggacttctaaatatggaggaatatatacccaaacgaaaatcgaaggcattattaggtaacattttttcagagtgtaaactctctgatcacgaaaagacaaaaataataaatttagattggcctcatattttcacgtttaatattgacgatgctatagaaaacgttaataggaaatacaaaattctgcatccaaatcgagcagttcagagagaatttatatctgctaataagtgtctattcaaaattcatggcgatattactgaatttattaaatacgaagatcaaaatctgatatttacttggcgtgaatatgcacacagtatagaagaaaataaatccatgctatcctttttatctgaggaagccaaaaactcagctttccttttcataggttgcagtcttgatggagagcttgatttaatgcatttatcaagaagcacaccatttaagaaatcaatttatttgaagaaaggatatttaaatttagaagaaaaaatagctctttcggagtacggcatcgaaaaagtaattacctttgacacttacgatcagatatatcaatggttaaataacacacttcagaatgttgagcgaaaatcccccacaagaagtttcgaactcgatgactccaagttaatgaaagaagaggctataaatttattcgctaatggaggccctgtaactaaaatagtggataataaaagaatcctgcgaaattctataactttttctcaacgagatgtctgtgatgatgcaattaaagcactacgtaatcatgactatatcctaattacaggtcgacgtttcagcggaaaatctgtacttttatttcaaattattgaggcaaaaaaagaatataatgcctcttattactcttcgactgacacattcgatccttccattaaaaactcattgataaaattcgagaatcatatattcgttttcgactctaatttctttaatgcacaaagcattgatgaaattttaaccacaagggtgcatcctagtaacaaagttgttttatgctcgagttttggtgacgcagagttatatagattcaagttaaaggataaaaagatattacataccgaaattcagattaaaaataacttgattaatgaagaaggtaactatctcaatgataagctttcttttgaggggctaccactttataaatcttcagaaacgttgttgaattttgcttatcgatactatagcgagtataaaaatagactaagtggttctaatttatttaataagcaatttgatgaagattcaatgtttgttttgattttaattgcagcttttaataaagccacatatggtcatatcaacagtcacaataaatattttgatattcagaattttatttcgcaaaatgatagattatttgaattggagtcaactaacacagatccaagtggagttataatctgcaattcaccatcctggcttttaagagttatcagtgagtatattgataagaatcctgcatcttataaaacagtatctgatttaataatatctcttgcgtcaaaaggatttcttgcagcatcaaggaaccttataagctttgataaactaaatgaacttgggaatggaaaaaatgtccataaatttatcaggggtatatataaggaaattgcacatacctatcgtgaagatatgcactactggttacaaagggctaagtcagaattaatatcggcacacacaattgatgacctcgtcgaaggaatgagttatgcaagcaaagtaagactcgatagtgccgagtttaaaaatcaaacttattacagtgccacattagtattagcgcagttgtctgcaagggctctatctataaataatgataaaatatatgcgctgagcttctttgaaagtagcctagaatccatccggaattataataataactcaaggcacataaacaaaatgatggataaaaatgatggtggctttagatatgcaatacaatatcttaaggataatccattaatagaactccttcctcgtaaggacgaagttaatgaattaattaacttctatgagagtcgtaagaaataatcatccttaaattaataaatggcaagtaactcattcccttgtcatttattaaactcttaagagccttatcccgaaaagtattaatctgagctaataagattgtttttcagctatgtcattattttattgccaatatatttacacttaagcattgacaggtagcggatagttatttttggcttgtaaataagccttttaataatagaactgtaagacaatcgctctgattttttgaaatttatctcaatgttaaattcttccgcttttggcacaaacgggctagagcagacagatttaatgagataagggtatagatgaattctccatacccttgaacgattacttcccagttgatttgcttggtttcagtcctggggtattaccgggtgtatccttattatcacgtctgcgttgatcgggttttcctgttgattttgcaattggttttggaccaggtttaagccccataatcgtactccttagccatgtcagaggttattcctcagtgtggatataaggggagcggtaagaattatcaagcttggatgggcggtgaaaaatgactacttgactattatgtgagcaatgtcagcttttgacatttagaggccagcccattactgaagtaagccaaaaatgagtcgcgatgagccctcaacaatgagggccacctcggagattg

SEQ ID NO: 59 - DNA, 11911 bp, Pseudomonas aeruginosa
gacagcttccagggtatcgtggacgcgtcatgcaaagagatggggatgagggattttaatattctaccccttgtaccccatgccagtggtcgacctcataaatcattgattttaaaagcctcacttagggcgctcgctgccaccgatgccccacgatgcctgacgatcttcaacgactccccgcaaaagtccctatgcctcggaaaagccgccaaccccaacaacaccacctaacaacaagaaacaggacctcgtgccgagcttgttagcgcgactgactagccgtccgaaagcaaaaacaccgcgagccaaacaaggcaatttcttgcccccctaaggaaccacctgaggattgaacaccagcgcagcttactgtatataaaaacagttaaagtcctgttctcaggctgcatctggatcacacagccgccgttactcggaaacacggcggattagcgcgcacgctcaggccctccagccctaacggaatatgaatatccagaaaatcaaacacatatcagcctcacgcagcgcatagcgccctgccagaacacagcaggaagtcattgcgtttgcgttcctggcaatccatcattcacggttagggcccctataagacctgcagaagcagcgcgccatgggcagacccggcaaaagcccccaaacgggtgtggagaagctttatggagaaggaaatcccccacgaaggattcacaggctctagtaaagagccgctccagacgctccttccctttaatatcgatgaacccgggcaggagcccatgaaaatccaagatttccccccactccccgcctccgaacagccgttgatgtttgcagacttgtttgcaggctgtggtggcctgtccctcggtctctcactttcaggcatgaacggcgtgtttgccatcgaacgcgacaagatggctttctcgaccctatccgccaacttgcttgaagggcggaaggtgccggctccgcagttttcatggccctcatggctaggcaagaaagcctgggcaatcgacgaggttctcgaaaagcacccgattgagctcagtcagctaaagggcaagatccatgtcttggcaggaggaccaccctgccaaggtttcagctttgcaggaaaaaggaatgaatccgacccccgcaacaagctgttcgagaagtacgtcgaaatggtccaggccatccgaccatcggcccttgtcctggaaaatgtccctggaatgaaggtggcgcacgccacaaagaaatggaagcaactaggtatctcgatcaagccccagtcctactacgacaagctggtagagagtctggacaggatcggataccacgtccagggcaatatcgtcgactcctctcgcttcggggtacctcagaagcgcccacgcctgatagtaattgggctcagaaaggacctggcccagcacctcgaaggcggggtagcccgagcctttgtgctgctagaggaagcccggctcaagcagctacaagagttcgaccttcccgaggccatccatgccgaggatgccatctcggatatggagataggtcacgcgggaacgaggccctgcaatgaccctgactcccctaggaaattcgaagagattgcctataccggccctcgaacggcgttccaaaggctcatgcatcgaggctgtgatggcaccatcgatagcttgcgcctcgccaggcacaagccagagataaaggctaggttccaggcgatcatcgacgaccccaactgtgccaagggcgtacggatgaacgccgagatacgccaagcatatggactcaagaaacaccgcatctacccaatgcaggccagcgctccggctcccactatcacgacactgccggacgatgtcctccactacaaggagcccaggatactgaccgttcgggagtctgctcgactgcagtcattcccggactggttccagttccgaggaaaattcaccactggcggtagccaacggacgaaggagtgcccgcgctacacccaggtgggcaacgcggtaccaccttatttggcacgcgccgtcggcttggctatcaaggcaatgttggatgaggccgtgatgctcgccggccaacaggcagagcgagaacaagaagagaaaatgatagccatcgcttgaacacataggagtcgaggggaatggatagctcccaactggaaggggcgcaatacccggccgcgcttgtcgactgggccggccatcactcaggaggcgtaaaaaggctgctggataaaaatagcggccagcctaacaagcagctgctacggacgaaccttttgtcccgtctccaggcctgggctaacaggcttcccaccgagacctcagctgtccccaggattgtcctgcttgtgggtggtcccgggaatgggaagacagaggcaatcgagtgcaccatccgctggctcgacgagagcctcggctgcgatggccggttggtcgaggaactctcgaaagccttccatccctcaaccggctccgcagtcccccggctggccagggtagatgccggcagccttgccaagctagatagcagactgagcctcgacattgtccaggatgcctctgctaccgccgggcatgagggaagcaccgcccccgtccttcttatagaggagcttgccaggctactggatggacctccgacccaagcctatctctgctgtgtcaatcgtggtgtcctcgatgatgccctgatccacgcaatagacaacaatctggaacaagcacgaactcttctcgaggcggttacccgggctgtaagcctggcgtacaacgcgccttcatgctggcccctcgagggtttcccatccattgcagtctggccgatggatgccgagtcgctcttggtaaagccggacgacgagcccgtagcccctgccgagatactcctaggccaagccactgctcccgatatgtggccagcgaaaggggaatgcccagcaggcgacaaatgccctttctgcgccagccaggccatcctcgcgcgggatgagaacagggcatccttgctgaagatattgcgctggtatgagctcgccagtggcaagcgttggagtttccgggacctgttctccctcacctcgtacttgctagcaggccaccatcctgtagtccacgatccctcagggactccccaccagtccactccttgccaatgggctgcgaaccttgtcgacctcgaccaaaaggccctaacggcgaaaaggcatggcaagcagtcgctaactgccattttccacctgtcgacttcgagctaccaacatgcgctcttccatcgctgggacaaggacgcagctacctcgctccgccgcgacctcaaggatcttggcctcgagaaggaactcgagatggaggaagggcgaaccctaatggggcttgtctatttcctttcggagcgcaaaagccactatctcccagcgaccatcgcccctctgctggaggggctggtcgaaacgctagatccagccttcgcaagcccagacggagaagttgcagtcagcagtcgaaacacaatagtcctcggcgacttggatatgcgtttcagtcggtccctggccggaggtattgaattcgttcgtaagtaccaggtgctatcgccaaacgagctcgatttactccggcgcctatccgcatcagacgccatgctttcgttaccgagcatacggcgcaagaggccggtggccgccagccgagtccagcacgtcctccgtgatttcgcatgtcgcctagtacgcagaagcatatgcacccggacggccatcgtggcggacgctcccattctcgaggcattccagcaggtcgtcgaggacagcgacaagcaccatcacctcttcaaggtggtaaggcaagtaaaggaattgctgaacactgggaaggagttcgaggtgtcactaaccactacctttggccaaccactcccccctcgacaacgccaggcaacgctggtcgtcccgcagagcccggtccggatgtccccccagaacaacaagggacgccctcacccaccgatttgctatctccatgtcggccaagggcaatcagtccagccagtcccactgacctacgaccttttcaaagccgtgaaggaactggaaagagggctctcacctgcatcccttccacgcacagtcgttgcactgctggacacgactaaggcccggctttccggcccgattgtccgcgaccatgaactactcgatgatgcccggatccgcatcggcgcagatggcacggtggtcggccgctcgtggaatggttttgctgaaagccgggaggacgacgtatgagccttgcggatttcaagcagaccccgtggagcaaatcacatccgaactaccagaagtcggccctggcaatcagccctgcccctgagtatgcgagctcggaagtcctgcttgcctcgctctaccgaaccataggcttcgcaacagccagcgagggcggcgtgccgcaggccgggcgagatctagacaagcgtatccagaaactccgcgagaaacgccaatccccaccaacaggagcggtagtcggtgtagaggcttggaatactgtgcttcacgggatcctggagagcccgaagcttcccaaccagtcgtccaagcgtttcctccaggtaacgcccatcgtacccggggccgcactcttctccgggtctgcccgtctgagcagcaactcgtggcccgcaggcagcttgattcgccgcatggtctgcctgggatcgatggatggggagacggcgcaacgactttggcaacgcctcttcgctgcattgaacgtggacgacgaggacgatgtcttcgcacgctggcttgaccaagagacatcggcgtggaacccgggagcaagcaactgggcactctcgccaatacccgcggacgagatggtcacgttggagacggcagatttcctggggatcccctttctccccgcccggcgatttaccaaggacctacaggccatcatgcaggccaagggttcaatgacccgccggcagtggactagccttctcgaggcattgcttcgcctggcagccgcatcccacgtgacgtggctgtgcgacgtccacgccaggacttggagctgcctgtgggccgcactaacggatggcattgctccttccagtgaactggaagcaagacgggcgctgttcccggaagccccgcagtacatgacgtacgggggaaaagccctccaaggcatcaaggacaaggtgtctagctacctaaatgcccggctgggaatcaatgccctcctctggtctctggcgcagataggagctccctattctggcaacctctcctcgagcgccggaattgctgcactttgccagcatattcgtcagcacaaggccgagcttactcgcctaggcacgcttgagacgattgccgatgtgcgcgagcaagaagcccgtgcgcttctttgcaagaaaggcatcggctctaacctgctggagtttgcgcggcacgtccttgggcaacgccaggctgcagtcccattgctgagggggtacgaccagggatacatcctgaagaagaaaggcagcagcccgtccagcccatgggttgtctccctcggccccgtcgccgtgcttgccttggtccactgcgcccttgcaggaatgggcggtccccgctcggtccaccggcttggacagcacctagaggcttatggcatggccgtggacaagcatgacattggcaggaacgacctgggccaccagttgcgaatgctcggcctagtgctagatagccccgatgccgaaagtggcatgctgctactccccccgttccccataaaccaagccagccagggcccggaacatgaatagacttgcacactggcttgccgccactgtccacgagaaagtcaggggctcgacacaagggttcggaggtaccagcctagaatatcggcttatcttccgcggcccacccctcgagctactcgaaccggcctacgacgagctggcccgcaacggagggatccaggtgccaagcggggcagacggaggactggtgaccctgccggtactgctccagtatccagccggccagctgcagggacccaggccacgcatcggagcatccggtaagtgtgacaacgaccacttgcttgatatacgcaacgaccctgccaaccctagctttattgccctggtcccgccgggactgcacaacaacctctcgatcgagtcaaccaccgacgaattcggattgggggcagccaccagcacggggcatgcatccttcgaacaatggtgggaggatggctttgtccagcaagcagtcaacgaggcgttgatcgctgccggcataacggacgcccagagggatgacgccaggggcctggtccgcgcaaccgcagcctcggtcgacgaggtggatccagacaagggaggtcatcgcgcggcctggcgcctactctcgcgcatctactcgatagcaaacgtgaatcaagggttgcctgcaggaacagcgctatcactggcatgtggtcttcccccaatgaaggagggaggaatttccgccaagactcagctttcggtcctgggaaaaatcgccgacgagcttgcggacggtttcaagactggcatcgagcgcctggcacaaggcgtccaacaaggggttgcgcaagcgctgcgcgaactgctttcccatctccactcgaattgcgacgtacctacggccttcgagcgtgccacagcggctttctacctgcccagtgccgatattgaactggcgcctcctccatcctggtggaccacgctcaccaccgagcagtggacggaactacttgccgacgagcctgacgaggtcgtcggcgagctaacgatccggtgtaccaatagtttgatccctatggggaaaggcttgccggccgtagtacgggacaaagtcgagctattgatttccacaagcgaagagagccaaccaaaggagctcctgttgacaggcggatcctacggcaaggttccgacgtcattgccagcgggccctaatgggactaccagccacattgacctatttccctcctcccacaaagcgccaatgagctacaaggtttccgcggacggctgcaagcctgcgagcgtccgggtcatctccctcgcgagctggaagcccggaatactcgttacctgcaggcttgcgacaaagctctcgccaccgaggaagccccgcaagaactcagctgcgatggactgggaaacatccctgtcgctgccgggctccggtcgttatgagctccagctccaccttgctccgggggcgagcattggaaaggtagaaggcttgccggacgatgccaccgaattcgaggagcagcgggagacaatcgaaccacggcaagttggggaatacgagtatctaatagaggtcgaggctgatggcaagtaccagctggacatcgcctttactgaagccggcgagcaagttccgaaggtctgccgggtatacctgacctgcgaagaggcaaaggaggaaggttgcaggagcgaattcgagcggctcatcaagctcaaccgacggcatctcgagaagttcgataccaaggctgttgtccatcttgaccggaacgcacgctcctccagcctgcagtcgtgggtgctggaggatcagaacgtatccaattccttcaggccactggtgatcgcggacgactatgcgtcccggtgggcccctcctgactgggacgccccgcacggccctgtactctcgaacgggcgtttccttcatgacccccgccccgaggccacgagcttccaacctcccaagggcttcatcgaggctcggcaggggatcgcccggtacatacgtggtagcgacgaccaatcggggctccttgagtcagcgccgcttggtgcctggctatccgaagaccctgggttccgctcccttgtcgaggactaccttggagcgttcatgtcttggctggacgccgacccgggtatcgcctgctggatcgacaccattgccgtctgctccctggagccggatggtcgtaccctgggaaggatcccagacgccatcatcctttcccccctgcacccattgcgcctcgcatggcactgcttcgcccagaaagtactccgtgacgaggccgagggcgaagccccgtgcccggcagcaagcatcctcgatccggactgcgtccccgatctactgaccatctcgctgcaggcaccgggaggagtggatcaggtcgacttcctttccgtcgaatgcagctccgactactggtccgtgctttggaacggatcccggctgggacaaatacccgatcgcgctcgccgggccccgttcgacagtagcttcgggctggcagttggagggatatcgagcgggttcagccccgcccaggtctcacgagcactcgacgacgtcaccgacctcctggcagccaagcctatcgtcagcctggtagtgtccagcgcaggtggcaccacggatgcatgcaacgaagggttggccacctggtgcaccaagcgattcggcaacggggaccatgacaccccgcggcacggtgtcgggccaaggattgtggaggtattcgataccaggcaggctggccggcccgaccaggcgacgatcgccaacctctccgaggacacaggcaaccacgtccgctggtatgacaagcaaccaactgggtccaagccagacctgggcatcattgcccaactagattcggcccaacccgaatccaaggaggtcggaatgctttcgccgatgggaaccggcggactgatcaggcaccgcgtcaggcgccaactccaagcctccttcctaagtgaatcccggcagggcctgcagatgccaccctccggcgaaccgttcgcagataaggtttccgcatgcatgctcatgatggaaaggctcagggacggcaaggtcggcctgcagttctcccctaatgtccatgcagtgtccagcatgctcgaggaaaacagcgctgggttcgtcgctgtatcgtcgtcagcaatcgaccccgcctgcttcctcggaggctggatacaagggacgtatctatgggactacgacctcccctcgtactcgcatcgcgcaggcgacacaagcggctactacctgttatcacaggtcaagcaggctgatcgcgatgcgctacggcgagtcttgaagccccttccgggatgcgaggatctggacgatgatcaggtcgagcaaatcctcctcgaggttgcgcggagggggattcctacggtgcgaggcctctccggggacgatacgggggcgacgggcgaccttggcctgttcctcgctgtccggctcctacaggatcagttccgtgtgacaggcaacaaggaaagcctgctgccggtgcttgccggatcaccggaggactcgacgatagcaataatcatccccgtcgaccccttccggggttacctttccgatcttgcccgctcccttggcaaggagcgcaaggatacctccctgtcgcgtcccgatctgctggtagtgggcgtgcgcgcatgcagcgacaagatccacctgcaccttacgcccatagaggtcaagtgcaggcaaggagtagtcttcggtgcaggcgaatcaaccgaggcactctcccaagccaaggccctgtcgtcattgcttcgtgccatcgaggaacgtgcaggtagttctctggcatggcgccttgccttccagcacctgttgctctcaatggttggctttggcctgcgagtctacagccagcatcaggcagtaggtgggcatgccggccgctgggctagctaccatgaacgtatcgctgcagccatactcagcccaaccccgccgatcagcatcgatgagaaggggcggctgatcgtggtggacgcgtcgctccagagcagcccgcatgatcgcgatggcgacaagtacacagagaccattgtcatttccagccgagatgccggtcgtatcatcgttgggaatgacgcacagtccttctatgatggcgtacgtgcaaaggtcgacgactgggggctgctaccctgccaggcaagtgcggccggcaccccaatcgtgcagcccgacatcactcccccggacgatgtccagacgggcgaccccatagtagtcccagcagaagatatccccggggcatccaccagtctggtcgatcagacatctaccggcgtagcggaaccaggggcaagccctgcccccccaactgacgagccagggacagggatcattctctctgttggcaagactgtggatggtttcgagcctcgatcactatccctgaacatatccgacacccggctcaaccagttgaacattggtgtcgttggcgacctcgggacaggcaagacccagttcctcaaatcgttaatcctgcagatatccagggcccgcgaggccaaccgcggaatcacgccaaggttcctgatcttcgactacaagcgcgactacagcagccaggactttgtcgaggccacgggcgccaaggtggtgaaaccctatcgcctgcccctgaatctcttcgacaccacggggatgggggagtcctccgcaccatggctggacaggtttcgcttcttcgccgacgtactcgacaaggtgtattccggcatcggccccgtgcagcgggacaaacttaagggtgcagtccgcagcgcctacgaggtggctggtgggcaaggccgccagccaacgatctacgatatccatgccgagtaccgagagctgctcgcagggaagtcggactcgccgatggctatcatcgacgacctagtggacatggaggtcttcgcgcgctcaggggaaacgaagccgttcgacgagttcctggatggagtcgtggtgatatccctcgattccatggggcaggacgacaggagcaagaacctgctcgtcgccatcatgctgaatatgttctacgagaacatgctacgcacgccgaagcgccccttccttggcacgtccccacagctccgggccatcgactcgtacctattggtggacgaagcggacaacatcatgcgctatgagttcgacgtgctccgcaagttgctactgcagggccgcgagttcgggacgggcgtcatccttgcctcgcagtacctgcggcatttcaaggcaggggcaaccgactaccgggaaccattgctgacctggttcatccacaaggtacccaacgcaacacccgcggagcttggagtactcggcttcacctcggacctggcagagctatcagagcgagtgaagacccttcccaaccaccactgtctctacaagtcattcgacgtggctggagaggtcatacggggactgcctttcttcgaactcaccaaccaagcctgaccaacgcccggcctgcgaatacaggccgggcaaggaggctcctaatgacagacttcctttctcccgcagaacgctcggacaggatgtcacgtatccggggcaaggacacgcagcccgagctagcattacgcaaggtccttcaccggctcggactccgataccgattgcatggcgcggggctactaggcaagccagatctcgtgttcccgcgatacaggaccgtggtattcgtgcatgggtgcttctggcataggcacaagggatgcaatatcgccacgatccctaagagcaacacacccttttggctggagaaattcgaaaagaatgtcgtacgtgacgcgcgagtagcaacagatttgcaggccttgggatggacggtacttgtcgtatgggagtgtgaactgacatctgccaaaaaagcccagaagactggcgaacgcctatatgaggttatccgtagtcgtagccacggaaagtatcggtaatcgactgaagcagccctgcggcctgtagtggtctactgatcccggacaccgatttaggcgaaaatcctcgccgtgagagaggtgtccg

SEQ ID NO: 60 - DNA, 11635 bp, Aquimonas voraii
cgaacggagcaggtagatccgcgctaactgacttgcccaatctggctgcattcgtccaacgctaggcggcttcgcaggaaaagcgaaacggagggagattctacgcgcacctttgtgcagacctgaggctccaccagacctgagagcccggcacgattgactgatcataggagtaaggccaagaagcgacttgatgcgcttgtaaggtaaattctcagcgaatcgaagtaatgacaccgaaacacgtgcggtcgacaaccgtgtaagattgctgataaaaagagcaggacgtcacaagaaatgaacttggaagtagtgccggcgagccggactttcatcgacctcttctcgggatgcggaggtttgtcgctgggactttgccaggctggatggaaaggactcttcgccatcgagaaggccacggatgcgttcgagactttccgggagaacttccttggtgagaactcccgctttgcctttgattggcccagctggttggagcagcgcgcacactccatcgatgacgttttggcactgcgcggtctacatttgtcgaaaatgcggggtgaagtcgacctcatcgcgggtggtccgccatgtcaaggattctcgttcgcgggcaagcgaaacgcgaaggatccccgtaaccagctctcccagcggtacgtcgatttcgtcgagcgactccagccgaagtccctagttctggagaacgttcccggcatgaacgtcgcccataagtatgagcacgggaagagtcgcaagacttactacgaaaagcttctgcattcgctttcaatagccggctacgtggtgtcggggcgtgtcttggacgcggctgacttcggcgtcccgcagcgccgcactcgactaattgccgttgggattcggtcggatatcgcggataagcttgcatgcgcggctagctcgactcccgcagacgtgctcgagggcatcttcgatgcaatcaatcaggcaggcaagcgtcagctcgtccgatatggccagggcgcccatgtcacggttcgggacgcgatctctgatctcgcgattgggccggccgatcacgagaacaccgaagactacgtgggaagcgagcgatgtgcaggctacaggcaggtcaggtaccaggggccgaacacgccttaccagatcgccatggcttctggggtcaccccatccgaaatggacagcatgcgacttgcccgtcatcgtcctgatgtagaaaagcgcttcaaggcgatccttgaaacttgcccgcgaggggtcaacttgagcgccgagttgagggcgcagcatagaatgctgaagcataggacggtgccgatgcatcccgaaaagccggcgccaaccctgactaccctgccggatgacgtcctgcactaccgagacccgaggatcctgacggtccgggagtacgcccgaattcagtctttcccggactggttccgtttcaagggcaaatacaccacgggcggggcgtcccgtcgtcatgagtgcccgcggtacacgcaggttggcaatgcggtcccgccgctgctcgggcaggccattggctcaggattaatggcgtgcctctctttgagttcaacgcgagtgataagggccagtgcgcccagtctcgcgatggccgagaaaaaggcttttgccgtatagcaattagtcagctgcaagaatcgaacaggtggatagacgatgacgaaataccccgatggattgcttgattggtcgggcaatcgggctggaggagtcaagaaactcttctacggcggcagcggccgccccgtcgggaaggtgatagagactcctctactcacccgtctctgggaatggtcggatagcgtcgtccagttcgagccgggcattccgcgggcggtgttgctgttgggagggccgggaaacggcaagacagaggcaattgagcagacgcttcgccgaattgactcaaggcttgcgctgagcggagcgctcatcgacaagcttgcggctgtcttcgagtccaaggatggagtccccccaggacgccttgtggaggtggatcttggggcgctttcaggggggcgctcgagcgggacaatctcgattgtccaagacgcctcggaggggaatccgggctctcctgatcttccggcgcaattgctctgcaacgacctagcaggactcgtcgaagacaacgtgtcaaagcgcatctatttagcgtgcataaatcgcggcgtcctagatgatgccctgatacttgcgacggaaagaggtgacacagaaattggtgctttgctgaagcaaatcatccggtcggtgtcgatggcggcccatggcgtctcatgctggcctctgcagggatatccgggcatcgcagtctggccaatggatgtggagaccttggtcgcaggcgtccagggtcaaccttcacccgcggagcaggttcttcatattgcggccaatgccgaccattggcctgatttcggggcatgcgaagcgggtcagtattgcccgttttgcacaagtcgcaggctcctttccggcgagccccatgcgggatctctcgccaagctgctccgatggtatgagctggcgagcggaaagcgctggaacttcagggacctgttttcccttgtcgcccacctgttggctggaacccctagcaatgccgatgcgtccggttattcgccctgcaaatgggcggcaaaacaactgaatccccccggcggcgacccgcgcaaggccgatgtactccgaaagcgcggagtctttcggttgctggcttcccaataccaacacgcgctctttggcgactggccaatcgagcatgcgtcgggtctccgaagagacatcgccgacctagggcttggtgatttcccggcgcttgtggctatccagcagttcctggcgctggataagcggcgggagtcgacggcaaccctccgtgcccagctctccggcatgtcatccgtattggatccagcaaaggcaagccccaccttcgaggttagggtaagcgctaatactgttattcgttacgaagacttggataggcggttcagcctgtccatccaaggaggcagagagtacctccaagaatatcagtgcctctcggagatcgagatttcagcactcaaggtccttgaggaggccgacaataagttgtctgatcacttagtcaggcgatctcggccggcgacagcaattcgagtccaggcgcttctgagggccatcgcgtgcaggctggcaaggaggtcgattggcgtcaggtgttgtgtcacaaaggatgccgacgtcctcgaggagttccaccgcgtcaccaatggcgattcgtcggcgctgcagcaggcgatcaggcaggtcgaggcacttctcaacgtcaatcgccggttcgttgtttgtctcaacaacacctttggtgagccgctgcctcccccagagcggcgcgcgatgcttaccacggacattcagcgcgttaagccggtgcccgccttggagggtgttgagcggccgagatcgccgatgcccttcctgagggtcggcgcacaaggcaacgccaggcccatagccctgaccttcgatctcttcaaggcgacgaaatcccttaggcgtggcatggtcgcgtcgtcacttccgaggtcggtggtcgcgcttctcgatacgacccgagctggtcttgcgggagcgatcgtgcgagacgaagacgctctggaaggtgcggagatccggatcggaatcagggatgaggtcatagtgcggacctttggaagtttcgtcatccgccaggagggtgcttgatgtccatgcaggagtttctcgcttcaccatggaagaaagaagcctcgcaccgagccttcaacgaatcctcttttggtatgaggtctgccccggagttcgcaactggcgaggtcgtcctgtcttcgctctaccgcgccgtcggctttgacggggtttccgaggagaaagtgccctcgcttggcaatgatttcaggaaggcgctggacaaggaacgcagaaagcagaacgcagctggtggtctgagcccagaagcctggcgcacggtcgtggatcgtgtcgtgcaaagtcctaaggttgcgcagcaatcctccaagcgattcctatcgctgtccccggtcgttcccgacgcggccatctactcgggcgccgcgcgccttggaggaaactcctggaacccggggcggctgatcaagcaaatggtcggaatcgggtcggagaccatggagggcgcggaaacgctttggggcgaactctacgatgctttgtccgtgacggaagcggatgatgtctgggcaagatggctccaaacagaatttagtcccaggcgcccagagcaaatagcgtgggccccaagaccgatggatcaaccagatttgcttccgcaatccgatagacggggagtttcctatcccgctcggcagttcgtggtggacctgcgaggaatcttggatgcgaagtccgccatgacgcggcggcagtggatcacactgctcgaggcgctacttcgaattggatcggtcagccatgtgctgtggctgtgcgacgtcaatgaccgcttgtggcgtgcgatgcgtgcggcgctcgagggcgaggcgagtggcgtgcccgccgatgccgccgccataagaaccgacattctggccgtcaggcggcggacgctctcgttcgggaatcccgctgtcccagcgattcgggacctggcctctcgatacctatccgcacgcctgggaatcaactgtgtcctttggacgctggacgaacttggcgtgggctcaagtcgactttgttcgtccgaagaaatccttgacttcatcaagagcgttcaggccaacgcaggggggctcaaggcccgtggcgtcatggatgccttccattccctgcaagacaaggaagtcaggaccattggctgtaagaaaggagtcggagcaaaccttctggaattcagccagtacacgcttggacagaggcagacgatggaccaggcactccgcgggtacgaccagagctatttcctcaggaagaacggggatgccaggaacgcgccatgggttctatctctagggcccgctgccgtacttgcgatggtccactcgtgcctacatgcggtggatggaccgcgatcgatacaaaggctttcatcccatctcgggagctacggcatcgagtttgatctccacggcgtcaacgatagcgtccttggaaagcaactccgaatgctcggactcgtactggatagcccggatgccgagagcggtatgctccttgtgcccccgttcgtagcctgaggaaggaggcaatgatgagcacgctagccaagggaattgcaagctgggtcgaaaaagccatggcgcgtgagatcgcgacgctggtggccgggaatatggagtgtcgcgcagtcttctgcggcccgccaaagcacatcctgaatcaagtatttgggcatcttatccacggtcgatcgctgatcgaagcgacaagggccgatggtcaggcggttcagtatcccgtgatccttcaggtcgaccgcctccctacagggtttcccatcggctccgccacacagtcgggatgccttcagttccatggactcgctgccgtcaggaacgacaggaatggtgttttcctagttcttgtcgagcccggtgctcaagcgagcgatacgcatgaatcaactcgaacttcgcttggactcgagccatcggtaaacgagggcggtgcctcgatcattgcctggtggtctgatccattcattcagtcgcttgttgattctgccctctcagaactctccggtcgcgacgccgcggctgccaaggatctactaaaggaggcgatgatcgccgccgacgcggcagatcagcacgaagtagcgagagttggagcctggcgcgtcatcgaacggttgtgggagctaaaagaacgcggcttgtctcttgaccaactcgttagcttggccgccggattcccgccctctagcgacggaagtattgaaccgagatccaagaccgccatcctttcagccatcgtggacaggatcgaagccgagaacttcggtggcttactgtcgtcccttctgcaaaaagccagggacgatatcgaaaaagaacacatcaccgcgtgcctctcgaatatgaggggcaggtgcgatgtggttactgcggttcggcgatgtgcgccatatgcgtacatgccttcggacgccatcgctggcgaagtctggtggaagtcgctcactgtcgagcgctgggaagagttgctcgatgatggcgctctacccgatgcgggcggcgacatcattattcagtgtgccaatccgatgatttcgcaccttaagggcatggttcccgtcgtcaagggatccgtgcaacttaggatcgaggttccagagaagtacgtgggcaggcggttggaggttatccgcgaggtcccgggtgcgaaggcggcgacgaaggtttggacagttgacgcggaacgcatgatccacgtcgaggacgacgagatccccccccacaagagtccgatgaagtactcggcaagcctcgaaggatcagccggaaagaaggcgagcgttcgaattgtctcaatggatggctggctccctggggtggttgcctctgcgacgacggcgacaaaaggttccctcccgaaacgctcaaaagcagcgaagttagaggcgtcgctgtctctctccgggcaggggaggcactaccttgacatctacttaaggccgggcgtcgagctcgcgtcaatgctcgccaccggtagtgacgaggaaggaaatccagacccgtccatcacggcgccaatcggcatggtcgcggagggcgagttcggggtcgaaatcgaaatcgaaggggaatgcttcttcgacatcacgctcagggttccggaggttgcggatgatcaggtcatccggatcgaattgtcggcggagcaatcaagcccggaagagtgctcaagccacttcgaattgcagctccttaagaactctagcggtcggaagcccagcgcggtccacgttaatgctcagctaagaagtgcgcagcttcaaggttggatgctggagcaggggcgcgctggtcgctcctattatcccttcgttatggccgcggactatgccgccgactggcacaggcgggactggactggcgcagatgacacgatcttctcgaaggctagcttcctgtgcgatccccggccctcgccggaagaaatggcgccgccgcaggctttcatagatgccagagccgcactggccgccaggatcaggggtggtgacggaaatggcttggtcgaaggtgtgccgctcggtgagtggatggcaacggatcccgatttcgccggggaaatagacgtctacttgaaatcctacatgcactggcttgcgagcgatccagatggggcggtttggtgtgacgtagggttggtcgcgcggctcgagcctaacggacttaccttggtgcaagagccggatgcggtgatagttagcccgatgcatccggtaagacttgcttggcactgtgtggcccagcgagccatgttccttgccgcacgaaagagaccttgtccagccgccagcatcctcgatccggattgtgtgcccgatgcgatcactctcccactgagaaacgccatgggtggcaagaccaacgccacttttttctcggtcgaatgcagttcggactactggtcgattctttggaacgcggggcgcttggaagccctttcttcacatggggcgacagccccgcttgaccgggagtttggcctactcgtcggcggaatctccggtgggtttagtgtttcgcaggtgcacaaagcgctcgaggacatctgttcgatgctggtggcgaagccggtcgtcggcgtcctggtgtccagtaccgcgagccagaacaatgcgtgcaatgaaggtctgctttcctggggcaggaagtacttcggcggcggggatagggcggcaggcttggacgcctgggtcggggccagcgaggtcaggatctacgacgacagaccggaagatgcccggcctgatgatgcggagatttcaaatctggccgaggatacggcgaacgccgtgcactggtattccggcacggtggccggcgaggctcccgatctagcgatcatcgcccagcttgagacctccaatcccggtgcactcccaaccaaactaaattctccgttgggcttcggtgggctcgtgaggacccgaattcgggagccttccagcatggcggggggtcaactgctccgtgagtcgcgcatgtctggtcccgcggcgcccactggcgacgggctggccgacgctgtagcaagtgccatctcgtcgctcgagaacatctcggagcaacgccttggttacgtattcgcccctagcattcatgtgatcaagggggcgctggagagcgcggaatttgccgcagtttcctcttcgagcgttgacccggcctgctttctcggaagttggttggagggcacctatctttgggactacgagctcccgtcgtactcaggtcgtgccggagacagcaatggctactacttgttgtcacggatcaaggatctcgacctcgaaaccctgagaagcgtggtcaagaggttccccggttgcgaggagatgccggaagccgtgcttgctggaatagtcgaggaggtcgcacggcgtggtattccaaccgtcaggggcctcgccgcaggtgattctggcgcgacgggtgatttggggctactcgtggccacgaggctgcttcaggatagcttccgggcggccgaatcaggcgctggtctcctgacgccttggcgcagggagggagacatcgaagagcttgctctcgtcattccggtggatccattccagggctatcttgacgatctcgcgaaggcgctaaagcgccctacgctccaccgcccagacctattggtcgcgacggtgcgaatcagtgacctgggagttcaggtccgactgactcccatcgaggtcaagaaccggggtgctggagcggcgatgccgcaatccgatcgagaagccgcgcttgcccaggcacgctcgctggcatccctgctagatgcaatgctggcaacgtattctgaggatcaagagatggttctctggcggattgcgcaccagaacctcttgacctcgatgatcgggtacgcattccgtgtttacagccaacgtctggcagcccaaggcaagtcgggagactggtcgcgcctgcacgcacgagtcatggaagcaatcctgagctcccaggccgatgtgcgggtggattcgagaggccgcctgatcgtgatcgatggctctagccaaagtggtccgagggatacagatggagatggtttccacgagactatcgagctctcgcacaaggatgctgcgcttttcatccgtggcgagcacgatgcgctctgcacggccatgaagcagaagctaggtggctgggaaatgttccctgaagggagggatgccggactctccaatcaatcgccgcccgtggcccatgagactgcgcccttggtggatggcggcgttgaggtgccgtcccttcacgcgctccaagcaacggcggggcccgagggcagctcgctgccgtcttcgggagtcgaagccatgggcgcgtcgcagccggcctccccgggagccatcgacgtggatggcggcatggcccagtccgggctgatcattcgggtcggtgaaacgatcgatgggtttgagagccaaattcggcggctgaatcttggcaacacggccctgaaccaaatgaacatgggagtcgtcggcgatctggggaccggtaagacgcagctgctccagtctctggtttaccagatagccaaggggaaagatggaaatagaggtattgagccgagcgtcctcatcttcgactacaaaaaggattactcttcgaaggagttcgttgatgcggtagctgccagggtcattagccctcatcaccttcctctcaacttgttcgatgtttcaactgcatcgcagtccatcaatccaaagctcgagcgctacaagttcttctccgacgttctggacaagatctattcagggatcgggccgaagcagcgagaccgccttaagaactccgtcaaggacgcatatgtgcaagccgccgaagggcagtatccaacgatttacgacgtccatcgaaattacgtagaagcacttgatggaggcgcggactccctgtcgggaatcctaggcgacctcgtagacatggagctcttcacgccggatccaagtgtcgttgtttcgtcggccgaattcctgcgcggagtggtcgtgatatcgctaaatgaacttggttccgatgaccggaccaagaacatgctcgtggccatcatgctcaacgtcttctacgagcacatgctgcggatacagaagcggcctttccttggggagaaccgcaatatgcgtgttgtcgactccatgctgctcgttgacgaggccgacaacatcatgaagtatgaattcgacgtcctgcgtcgggtcctcctgcagggacgtgagtttggcgtcggggtgatcctcgcttcgcagtacttgagtcacttcaaggcaggtgcgacggactaccgggagcctttgctttcctggttcatacacaaggtcccgaacgttcgtccgcaggagctttcggcgcttggctttagtgatgcggtgggattgccgcaattggcggagcgtatccgtagccttggcgtccatgaatgtctctacaagactcatgacgtgcaaggtgagttcgtccgcggcgcgcccttctacagacggggtgagtgggccaaggaatgacttttcgtcgtgtcgatttatcgcctagttacgcttttggtcttaagttgcgttcctaagagaggtgggctgtgtccgacaatgcgtattacgtttatgcgctgaaagatccacggatggcgcccgcccagccgttctacataggtaaaggaaccgggacgcgctcccatgaccatcttgtaaggccagacgattcaaagaagggaagcaagatctccgagatcatggcctcagggcgtcaggtgctggtaacccggctcgtggacgggctcacagaagagcaagcgttgagaattgaggccgagcttattgccgcttttggcaccctcgatactggggggatgctcctgaattccgttctgccaagcgggttggtaaacaagagccgtagctcgctggttgtcccgtctggcgtaagggagaaggctcagattggtctggcccttctaaaggacgccgttctggagctggccaaggcgaatccgactggtatctcgaactccgatgctgcgagcatgctcggcctgcgtagcgactacggcggaggatcgaaggactatctgtcgtacagcctcctcgggctgctcatgcgggagggaaagctcgctcgggttgccggcactaagcggcacgttgctcaagtgagctagctgtggggttccggatcgggctggcccgctcggcgctgcgctacgaagctcgcttgcctgccaaggatgctgcggtcatcgaacgcatgaagcactacgccgcgctgtatccgcggttttgctatcgccggatccatatctatctggagcgcgagggcttccatctcggctgggaccggatgtt

SEQ ID NO: 61 - DNA, 3066 bp, Escherichia coli
gatggactggtactgtagattcaccgtggaccagcgaatctattatgtggtgagcagaacattaacacatcaatgtaacgccgtaatcattgagtctttgccggggacgcttgacatctccgaaagaattatatcgtgagtcttaaggggaatctcttgcttccggttatacatttaaccggatctagctataagactgttacatctattgggattaggtcaggacagatagcctgaaagcttttatagtgagggacttcagaaataccctagaaaaggaactgttatggtaggttcgcgctggtataaatttgattttcataaccatactccggcttcgcatgattacaaaattcctgacatcagccccagagagtggcttctggcttatatgaaacagcatgtcgattgtgttgtaatcagcgatcataacagcggagcctgggtcgacgtgttgaagggtgagctggagaatatgtcccgggacgccagcaccggcgacctgccggaatttcggccactgacactctttccgggggttgaactgacagcgaccggtaacgtacatattctggctgtgctgcacacgcacagtacaagtgccgatgtggaaaggcttctggcccagtgcaataataatagccccattccgagtgaagtccctaaccatcagctcgttcttcaactgggccccgccggcatcatcagtaatatccgccgtaatccgaaggctgtttgtattcttgcgcacattgatgcagccaaaggtgtcttaagtctgactaatcaggcagagctcaccgcagcctttcaggaaagtccccatgccgttgagattcgacaccgggtggaggatatcaccgacggaacccgccggcggctgattgataatttaccgtggctacggggctctgatgcgcaccatcctgaacaagccggcgtgcgaacctgctggctgaaaatgtcatcccctgattttgacggactcaggcatgcactgctcgatccggaaaactgtgtgctgtttgatcagctccctccggaggaacctgcgtcatatttgcgcagcctgaaattcagaacccgccactgccatcctgtgggtcaggattcggcctcggtggaattcagcccgttctataacgctgtaatcggctcaagaggcagcgggaagtccacgctcattgaaagcattcgtcttgcaatgcgcaaaacagaaggtctcactgcgacccaggggagtaagctggaccagttcattcggacggggatggaagcggattccttcatcgaatgtattttccacaaagaaggcacagatttccggctcagttggcgaccagacagtaagcatgaattacatatcttcagtgacggagaatggatgcctgacagtcactggtcggctgaccgttttccactctcgatttacagccagaaaatgctctatgagctggcttcggatactggtgcattcctgcgcgtctgtgatgagagcccggtggttaacaaacgggcctggaaagagcgctgggatcagctggaaagggaatatctgaatgaacaaatcacgttgcggggcctgcgtgccagacagggaagtgcggattcgctgcggggggaattatcggatgctgaacgtgccgtcagtcagctgcagtcaagcgcctattatccggtttgcagacagctggccctcgccagaaacgagctgtccgcagcaaccttacccctggagcactttgagcggcgtattgcagccattcaggctctggcagaagaaccgctgcagagatccgatatcccgccggaaccttccggtctgctgatggcatttatggcgcgcctgtcatctgtgcaacagcagtatgaccagcggctcaatactctcctggcagaatatgctgcagagctcgcgggtatcaggagagagcaatcttttattgccctccgaacagcagtgagtgaccaggaaacaaatgtagaaagtgaagctgtttccctgcgggccagagggcttaatcccgatgttctcaacgaactgatggcacgctgtgagtcactgaaaaatgagctgagaaattacgacggtcttgatggggcgatctctgcctctgttgcacggtctgagcagttgctggctgaaatgcgtgcccacagaatggcattgacagataaccggaaggcgtttctctcctccctgtcgctcagcgctctggaaatcaaaattcttcccctctgcgccccttatgaagatgttatatctggttaccagacggttaccggcatcagtaattttgccgaacgtatctacgataacagtgacgggagcggattactgagcgactttatcagtgaacgtccgttcagcccgttgcctgccgcaacagagaaaaaatacagggcgctggacgagctgaaagcgctgcatcacagcatccggctggataattcagaggctggggcggggcttcatggttctttccggaatcgtctcaggagtctgaatgaccagcagctggatgccctgcaatgctggtatcctgatgacggcatccacatacgttaccagacccccggggggcagatggaagacattgcctttgcttctccggggcaaaagggagcgagtatgctgcagttcctcttatcctatggcaccgatcctctactactggatcaaccggaggatgacctggactgcctgatgctgagcatgagcgtgatccctgccatcatgtcgaacaagaaacgccggcagctgattatcgtgtcgcactctgcccctatagtggttaacggcgatgcagaatatgttatcagtatgcagcacgatcgcacaggcctgtatccaggactctgcggtgcactgcaggaagctccgatgaaggcactgatatgccgtcaaatggaggggggagaaaaagcgtttcgttcgcgctatgagcgtattcttagctgaagaacggaaccgtccttaaggcggccatgaccggagagtgggcctggcggctgaatgcctggataaaagacgcaaatgtcagactgatggcctctgcgtctttg

SEQ ID NO: 62 - DNA, 7356 bp, Escherichia coli
cctggtcctgccaattgctcccccagccatatgacataatccttttgaataatagggtttttatgcttgtactctagcccattcgcggtatcattttacgatctctcttccagttttatgcttaccgcctttgcctatcgtagaacaatgccgggaagcgttatcagcgattaagggcaaggaatgagaaaaagctggactatagaggaagattgtaagctgctaaccttggtgcgtcagctcttttccgcgctggtcagccataaccggctgaatgccacaatgccatttagccagcagctccacgatgcatttgactcacctgaccgcgatgccgcagcattgctttatcgcctcgaacaggcaaaaatcttgggatttgccagccgtcctggtggcgatcccactaaacaactgtttcgctgcctgataagcaatgatttggcgctatacgattacagcctcacctttcccaccctcagaaaagcattgcatccagataccgttgcggcagcactaaaccacttcacgattagcaatccacacgaaccactgtccaatactatcaatgaaatcgcgacagccttgcatcttgcccccatacaggtggaaaagattctgatcgacagcggccaaataaccatcaatagttaccgcaagtgtgagcgtgttggagagaaaaatatcaataataatctgcaagatctcatctctaggcaaattcctgacataacgctgattaaagagattaacgcctgtcgcgcccaagtctctcaactttaccacgtgcatgaacgtgatggcgctgaggtcatcttcagttccgacggcacggggttcggcaaaagctatggcgtgatccaagggtatgtcgaatatctggagcgcttcgccaaaacccaaaagtcagacgatctgtttcctgaaggtggctttaccaacctgctattcatgtcaccgcaaaaatcacaaatcgacctggacagcagtcagaaagagaaaattctggccgctagcggcgagttcatttgcgttctctcccgtaaggatgttgccgacctcgactttatggactgggcctctggtctgaaaaaccgcgaccgctatattcagtggtacgaaggggcgaaaggcagcaaatatatcggcggcgctatgcgttcgctcaattatcatgtcttacaaattgatcgctgtgaagagcagttaaaaaagctgacaacatacggttctcaggataccaactacgaaagagaaattctcgaagaacagctaaaaaactgccgtcacagtatccgcaatacgattgagtcagcctgtaaattactatttggaccagatagtgaaaaagcttccattaaagagtacattcgtcgcgggctccaggcgcggcaagagcgaatgcaaaacgcggagacagcacgaaaaccaggaaagcttgaacctaagataagcgtacacgaagtctatttcgagcttatcaaacaggtattgcctttcgaagtttgccagtaccgcccgtcagtgctattaatgaccacgaataagttcgacacatcaacttaccgactggcgcctcgtcagcgaggcgaaggtgtgcgttttgagtccgtaggtttcgacttgctgattggcggtaagctgactcccaaagatccacagattagcaccgttgcggcagccggtcataccgggcaggttacctatcttcgcgacgaacacttcagacgcaatccagattgtccttttcgccagaaaaatattcgttttacggtgatcattgatgaactacatgaagcctacactcgccttgaagaaacatgccatgtaaagctaatcacacaggaaaataacctggcgcacgttatttccgtcgcaggacgtattcacaacgcggtactcagcttagaacgccgaaacaagcccaaagaagcgcaaacgacctttgagcaagagatggtcaaattcatcactactctgcgcaatttactggcggaaaagtgcgaactatcccccggtacaaggctgggatcgatcctggagatgtttcgtgaccagttaggggcatttgaagtcaacggcgacgccgccgaacgcatcatctcaatcacccgcaacgtattcagctttaaccccaaaatgtacgtcaatgaagaagggctgaaacgcattcgcatgcgcaacagcgaaggcgacataacgcgcaccgaactgtattacgaagtcgaaaatgatgccaatgacaccaaccccactctgcacgatctgttccagttggtctccgtcatcctcgccgcctgttctgaaatcaccaaccggcactttaagcgctgggtaaagaatggtggccaggacaactccagcagccagaatacgcctttgggccagtttgttgacgcagccaataacgtagccggcgtggtgcgacatatcttcgatcgcaccaccgataaaaacttgttgattgatcatttctacacttacctgcaacccaaaaccgtattcacgatgacgccgatagctgaactcaattacgtgaacaggggagccgagcgcacaattattctggcgttcgagatggatctggtacaagagttgcctgaagccatgctgctgcgtttattaaccggcacgcacaataaagtaattgggcttagcgccaccagcggttttagccacaccaaaaacggtaacttcaatcgtcacttcctggcgcactatagccgcgaccttggctaccgggtcgttgaacgcgaaaaggcagatatcgatacgcttaaggcattacgcgggttgagggccagtatccgcaacgtagacttcagggtgttcgatgataagcagttaaaattgaccgatatctaccaaaattgtgaaatctatcgcaggacgtatgacaactttttcgacgcgctgaagaaaccgctggaatacgacctgaaaaatacctataaacggcgtcagtgccagcgggaactggaagcgttactgcttgccgcctgggagggtaaaaacagcctgattctgtcactttcagggacgtttaagcgggcctttatcagcgcctggcgcacgcaccagacaacctggcgtcagcagtacggtatgcactcccggtgcgatgaaaaaacggataacggtaagaaacatgaccagatcctgacctttaccccattcaaagggcgtcacaccgtccatttggtctttttcgattcaccactggctaatgtcgaagatatcaggcaagaaacctatctccagaacagcaataccgtactggtatttatgagcagttataaaagtgcgggtaccggcctcaactactttgttaaataccatgacggcgatattaatgatatcaatgcaccacgtctggatgtcgattttgagcgcttagtgctcatcaactcctcgttttacagcgaagtaaaggacaacagcggcaacctcaatacattacctaactacgttaccgtgcttaaacactacgccgatgacgatattaccgtccacaagctggccgatttcaacgttaatttcgcccacggcgaaaactatcgcctgttaatggccgaacatgatatgagcttattcaaagtcgtcgtgcaggccgtagggcgagtcgagcgtcgcgacactctattgaaaacagaaatctttttaccccgcgatgtgttccgtaatgttgcatttcagttcgccgctcttagtgaagatagcggtaacgaggtggtatcagaaagtatgtctttgcttaaccaccgactcatggaggagtgcgaaaagctgagtcagggccagtcattcaataatgcggaacagcgactgacgtttgagcaagctatcgtcgcgaatggtcgccgcatcgatgaaattcacaaacgtgtccttaaaaccgactggattaataaggtacgcgctggcaatctcgattatctcgagatatgtaatttattccgcgatcctgactcctttaccgatccccagcgctggctggcaaaactccaggctaatcccttgtataccgccaatcgacaaatgcaatctgttcacgacgctctgtttatcgatcgtcagcaagggaatcaaacgattttactttgccacaaacgcggcccggatggacttgcccacagagattattccgccctgtcggatttcgctggcggcgcaagagagtaccggccagagctcaccctctttccgcagtatagaaacgatgtcgattttacccccggcaacctggtcggcgagttgattcgtgaatgtgacaacatccaggaaaaggcattcaaaaaatgggtacccaaccccaggctagttccgttgctcaaaggcaatgtcggtgaatatctcttcgataaagtgctaaaaagttatggtgttaccccactctccgaccagcaggtgtttgaacgccttgaaccgctggtctatgagttttttgaccgctttattgaagtgggcgacgacctgctctgcatcgacgttaagcgctgggcgacacagttggacgatttgacgcgggcagaagaaacgcttgagaaaagcgacaacaagattcgccagatccgtaatatcgccagccaaaaggcggatactgaggggcagaaacagctccagacggcgctggcaggccgttatgaacgtattcgatttatctatctgaacgtcgcctacagccagaaccctaataatctgatgtggcaggataatgtggatcacacgatccactacctcaacctgttgcaaactgactaccagtattatcagcccaaaaatcgagagagcggacgcgctcaggaaaactcgaaactgcgcatgacattggatataaacccaatgttactaaccctgctgggtgtagaaaagttgccgactaaaggaaaagtatcatgatccctaatctgaatgagctgacggatactccgattgcccgtaccaatttgatcaagcttgaagaagatcagctgacaacaatccagcgtctattggccccggtatctaatatctatacgatagactttatggttcagcactttactaaagagcgaaaagaaaaatccgctgattactatgcgcgaattcatcaggaggtaaaaacttgcgtgcggcagaagcttgggcttgaggccggacaggaagtaaaatatgagctgcattgcttacccaattaccatcacgtcttttttttcctggcgcctgctgctgcaccgaacagcctagcgcatcggactttggcagaacgcattgaaacgctttgccagcgactcacagctgaaaattatgatttatctcgcctgattcagggattgttcagtctgcatttgaaaatggtaatgctggaacaagccagcgagcgcttttcggtaccgccaacctacttcaactctacgttctatctcaacgctcgcctgagtcagcccgtcacgcagaaaagcggcactggagtgatggaggcattcgaactcgacatttatgcatcagaatataacgaactcgcctttaccctgcacaaacgaaaatttctggtcgaaccggaggatgaattgcatctctctctggacgatacctgcgtgtggtttaacatcgataatcgtcggctcaaagcccggcgcaaactcgatgcccgggatagcaaactggacttttttcgtgagcgcagcggctatggtgaatgccaggcctatacctataacgtggtcatgaatgccgcctgcgagcggctcagtgaactagagatcccgcatcagcctatcgcatttcaggccacccacgaggtcaatcagttcgctaccgacctcgatcaacaactgactaatacgctgttggtggttaataacggcgtcgaatttagcgccacgcaagaagcttatttctttgacacattagccatccagttccccgggtatcaactctggcctctggcgtcgcttaaacattctcagcaaaccggcttttctgagctgcctgccagtacatctattctggtactcaatgcagtagatgaagagcggagcaacagcatccgccagcaagataatgaatctgttgagtacaatgatttctatgcggcctttgccgacgcccgaaaacaacccgaactcaattgggatacttatacccagcttaaactagatcgtttgcaagggtggctaaatcagcaacctctgcccgtagtcttacagggtatgaatattgatcacaagttgttggatgcgattgattttattaatgaacaattgacaagcaaccctactcaatacgaaatcgatcttacgaagcctcacagtcgtctcaagtcagcagttaccttacttaacagtaaggttcgccgaacaaaaaccgagctatggttcaaagagagcttactcaatcagcatcacatcccactaccagatttggcggacgggcactataccgcctatgcagtacgcaaaacgaaaagctatctccccctgcttggatatgtcgaactaaaaatagaacacggccaacttagggtggttgataccgggatcgctgaaggtaaattagactatctgtctgttgatcccccctctctgggacgattaaagaaattattcgacaaaagcttctatctctacgaccacacagcagatgtcctgcttaccacctacaacagctcccgcgtaccgcgcctgattggcccggcgcaatttaatatcgtcgattcatacgcttatcaggaacaagaaaaaactctggcagagcgtaaaggggataaatttaacgggtacgccatcacccgctctgcaaaaccggatcaaaacgtactgccctatctgatatcacctggccgctcgaaatacgactcgctgaccaaagcgcaaaagatgaagcatcaccatatttatctgcaaccgcatgagaatggtgtatttgttctggtaagcgatgcccagcctacaaatcctactattgcacggcctaacctggtggaaaatctgctgatatgggatgcccaaggcaaagccgtagatgtatttagccacccgttaactggcgtttatctcaatagctttaccctggatatgctcaggagcggtgaaagcagcaagtgttcgatttttgccaagcttgcccggttgatggtagagaactagcggaaaatttagggcggtgtttttagaattcgttatgtgtgaacctaactgatctcccccctgaaaacagtaccagtctaaactgaagtctccggtctttcttcctgctcacagagaggcttattaccatgaaaaagacccgttataccgaagaacagattgcgtttgcgctgaaacaggccgaaaccggcacccgcgtcggggaagtctgcagaaagatgggtatttc

SEQ ID NO: 63 - DNA, 6714 bp, Pseudomonas syringae
caactgaggcggatatggccggtgcgttcatgtcctgaattaattcgaaagacaaatcgcgttaccaagcgttgcgcgatttagcagcaaattgatagcttagccaccaacatttacacgttgtaggttgtcttggccgccattggtcttcagcaacctgcaacgctgatcagtcgctcagggaagatgaggtaccgcagatggacaagcacgcccccgagcacctgctccgccttctagcccaaggcgcctcgctgtgtggcaccgacagggccgaagcgtttaccgtgcttcaaagagcatccgcattgctctggcgcctggagcctagcgctccccccatgtcagcgatcaagcttgaaaatcagcttagcctacccttggaaaagtggttgccggatgcactgaggctagattattcgggcccactgctttactccaacatcgcgacgcagacctgcaacgaaatgctgcttgagctcgacgtcagtcagctctgggaagaagtccaggcaagcgtaaatagggtcaagcaggcgtgtcggctgcgggcagagggagaaattcactaccgcaacttcaggcttttcctcattgagcacggcgtgatctttccgtctgaagcccaagatgtcttcatcccgctcaacctctccctgaacgagttctacgaccccatccccctccatctgtatcacaacggcttagtctacttgtgcccggaatgccggtggccaatgaatgcccagcggcacgaagtcagctgcgactcagcctggtgccaagacaaaaaaagcctttttgttcgtgaaggtacaagccttctcaaccgtgtgaacaacagcgtgctgcatggccagccggtcgatggccgtctgatgctcaaacctgcgctgtggaaattcaccctgcagccaggacttatcgaaatcgccctggcgagtacgctggcgggaaaagggtttgatgtgagtctctggccggatgtggatcgaacagacctccgtatccagttaggccttattgagcaggacatcgatgccaaggtttgggtgtccccttacgagttggccaaacacatcgaatcgatcccctccagcaaaccacgttggatcgtgattcctgactatcagcgggagagcattccgtttctacgccagcgctgcaagtctggggtgagtgtatttacccaaagccagtgtgtgaaggaggccctgaaacatgctccccctttctgataccagcgtcatactgttcctcgccttagccgcgcgttacgtcggcaacgaacccatggtggcggacgcagcagcgctctgcgcgggtcgcacacgaggctggagcacttggtacgtgctatccgagcctgaccagctacttatcgctgaaggcttgcgcctacgcccatcctccgtggcgcagcccaaacgcttcgtgatgaccgcagaggaaattatcaagggcgaacgtagcccctttgagttagtcgactctggcaagctcagcagtgagctccacgagcaggattgctatcgcgtttcaccccacctgaacgtcgatcagctcatcagggagcacctagatgcgttgagatatgggcgccccccatcggttcatgcacagattccagactcaggggatgtcgttctcaagcacatcacaggtgatcaggtcagggtgttcgtcgtcccacagagcgagcgaggggtgctcagtggcgcccaccagtacgttactgtcccaacctcccatgcagcccctgagacgaagtgggaacttgacgctctgaacgagctcgcggagtcactcgatggtgcaaccggattgcacacgaatcatcgaagctcgttggccaacatttggggttcggatccgctacgcacagctgacgcaggtcatttttatcgtgtgaacgcgccgactggcaccggtaaaagtgtggctatggtcatgatgtcgatcgatgctgctcgcagaggacaccgggtggtgatcgcggtgccaacgttggttgagcttgagaacacggttcggattctcaagcaatccgctgcggtgacagcgcctgatatcacggttgcccccctgcactcagcaacacgcgtatacgagcgcggaaagcttcaatttcagcagggtcattctgcaccggcctacgactatgcctgcttactcgatgcctatgcctcggatacgctgcaagttgaacctggaaaagaaccgtgctttaacgttcgggtatcgacacaggaagaaggtcgtgcagaacaatcaaagcggctgaatcactgccctttcctgttcaagtgcggacgaacaacgatgctgtcgcaagctctggaagcggacgtcgtggtgattaaccatcacgccctgttgtccggaacaacccgcattccattgtccgactcagaccggtgtccaggcccacgcagcttcatagagctgctgctaagaacagcaccggtgtttcttgtcgacgaaatcgacggtctactgaagtctgcgatcgacagcagcgtcatcgaattgaagctgggcaatcaaggtgacaacagcccgctgctccgtctattcaatacagtggccggtcgatccagcattcctgagattgatcgaagcagcatgtaccgcgtgaactgggcgcttacctactgcacgctgagtgtcagccagctaatgaacctccagcaagaggaatatttcgagtggccaaagaaagaaaccacttggtcggacgcagacgacacgttcattaccgaaaagcttggtattgatcgtgagacgcttgagcacttgttcaacagcacgaaccgcataccgggctatctggaaaagctgagtcaccaccttgctcactggcaatcaaatgggggccagtacaagcttgaggccttggcaatcaatctgggccatctcgtcaaagagttgtccgacagcgacttgcttcctgcgcgtctcaaggagcacgatcaaatccgcctcaaggcgtcactcatcttgcgaggcacgttagaagcgatcgaaacgcacctgcgcaaccttcaggtcgagctacccagcttcgtgaacgccgaaataccttatgcctacgaggtcaaacggagtatcgcagggccggagccgctgagcccgactccgaatggccccttgcagcgagccgtatttggcttcaaacgtaaagacaccggagacaacgactcaactctgaacgttgtcgcaatgcgtggggatccgcacagcacactgctttcgctgccagatgtcagcgccttgggctatgccggtgtaaagcgattgtttatcggcttctcggcgactgcctacttccccggcgctagcgcttacgatcttcgtgctaaggatttcatcgacgttcccgatgtagctggccaggtgactttcgaaaatgtgcctcagacaaccgctatctctggcgctcagttctcgcagcgaaaattcctggtatcaaaattcgccaaagagatttggccgtggctacgcagccgacttgcaagcttggccaacgaccccgtcacgcagacgcgtgcccgcctgctgctggtcaccaatagcgatgcagacgctgaagttctggccatgaccctggccaggatgcagggcggtcctggtcagctggtaggctgggttcgtggacggcaaagcgactacaagccgtcctcgctagatgcacagcagatgcttgcatacgatgatctcgctgagttcaccaacggccgacacaaggacaaaactctgctggtcagcgccttgggcccaatggcgcgtggacacaacattgtgaacagcgacggattttcagccattggtgctgtggtgatctgtgtacgccctcttccatcgtcagatagccccaacaacaatctggcgcacatctgttacgaaaccagcaagtttgtagcgccatccagcagtccgggcgtattgatgatgcaggaacggaagcattccaatgcgctgctgcaaaagattcgtaccgcccgccccgcgttcagccagcagccggccaacatccgccactacacgatcatgaacatccttgtgagcctcacccaactgatcggtcgtggacgccggggcggcacacctgtgacttgctacttcgccgatgcggcatttctcgaaggtttgaagccgtggcctctgatgcttaacgagagcgttgaacagctcaagcaagacggcgattggaaccagtttgcccgtcatcatgccggcgttgcatcggcacttttgaaatacatcaatggatcagtgaaggacgcacgatgaaggttcttgaattacgcaccagcctctttgagttcgatccagcagctttgggacaaagctaccgcgtcgtggtaggcccgcattaccttgatgcctggcaagctcttcagggactggtaaggaaaccccatcctggcctaccgaccatagggcttgaggaaatgctcgccaccctctctggagggccggtcaaggtgaacctgtttccgcaaaaagaaggaggcgtctcggcgatccttttgctgaagcccctgcccgttgacaccatcaacgaagcgctccgcctttgggctatggacgtgatgcagttttacaaacaagaactgctcgaattcgaaggcaaactggtcgtcaccgacctggtacctatggacactgcccgcttggtcgcgtccggtgacgtatcgtcccttgcgtacacagtcattccttggttggtaggtcaagcgctgattgcgaagccaatgcaagcagcgaaacctcttaagctttatcaggctgccgacgggtgcgtgctcgcctgggacgacccagtcgtttcggaaagcgacgtacgctacgccagtgcgcttcacgccatcgagcctgcattggtgctgatctacggccaatccaagccctatctacagctgcgggtaaagctgactcaggtgatgccgaatctcaagggtcaaaagaagcatgcctgggtcaaaactggcgacctgattgtcaaagcaaaaatccggagcaagcccgacgggcatgggggctgggaaacattttacgaacatcccattgaaaagttgctgacctttatgggggttccgtcgtttcctccaataatcgagggcgatatccctgtcgacagcgacgtgcgccctatctacgccattccaccctcgaaccccttgatcgcgtcaggcactggccccctgtttcttgaccaggcaggattccatctgcttgcttgtctaccaaggacaaagccgcttctggtcagaaaatctgtcgctgttctgcgcgaagaaaagaccaatgctacgggcgaggtgatcgacttgaacgtgatggtcttggcagctcacgcagacgtgatgctaaggcttcacggggcgagttcaaacttggccagggacagcaagttcttcaagaaagtcgccccaccacgtgtgacgctgtcacgtctggatgtgccagatgcgcagcgtatgctggaggggcagcatgacctgaacagcctcaacgaatggttattgaatcacgtggttccggcgagcagagtgctcgctcaaaacggcgccaaggtcatgattgttgagaccagtgcatcagcagcatcacgcgaaactggactcgatcccaagcacgtcatccgccgggtgctggcgaagcatggcatcgctacccaattcattatgcacgttgaccccgatgcacaggtgaagaagcgcaagcctaaggaagatgaccgtgatttcaaagcgatcaactcgatcatcgaagcgattcggttgagcggccagcaccctgcccctacacccaaggtcaagtcgatgccggccaacactacggtagtttcagtcctgctagatcgactccaggacaaaggctgggcgaaatttctacccgtgatcacgcgcaccacgctcggtggccacacccctgaaatcttctggtttgagtctggcgcagagtctgcaggcaaatggttcagctacagcgcgggactgactgcgatccatgccacggacacgctgctgacgcctgatcaattgaaaacactgatcacccaagcccttcttgattgcaaaatcaatccagctgactcgttgatcgtctgcctcgatgcagacctgagaactttttatgcaggcctaaaagacagtcctggtgaggggctaccaaccgtaccggacgatgcagcagtagtgcgaatccgtgcggaccatcaggtagcacagatcagtggtagccacaccttgtcgccgcaagcagcccactacattggcacgaaggtcggcgcgttccagtcctgtgagagtccctcagtgttttactttgtgtctccatccaagcagtttggcagcgttcgttcgcagcgtgacaacacccgttacgacgtacgggagagagatcttcgggatccttggcaacagctcggcgtcacggaaattgccatcatccagcctggagcctttgacggtgcagctgcggttgccgagcaagtggcgttgctctgtcgcaacccaccactgtgggatggtcatctgcgcctgcctggcccgatgcaccttggcaagcaagtagctgcagatcatccagttatggaagcgcggcgaaagacagaggctaatcgatcagccggttaaagccgcctggtaaccgttcattactagacacgtataagtcataacacccagcatttcacaaagagcgcga

SEQ ID NO: 64 - DNA, 5424 bp, Klebsiella oxytoca
atttgcctgagacttatttcccgtggcgcttagctagctaagagtgggcatcgtgagcaccattgatgatatgaaatgacggtatagcaatttaaccgtctggatttcaccagaaattagtgattcaataggaaattaaatacgttttatatttcaatgtgtatcaaaatcattcctgaaatttcctggtgctatatttgatgaaaacggataaacattctgttgattttaataaaattctgtctttcgatttagagcttacgcgtgatgaaaagttaaggcatatgggggccgtgctggcggaacgcacgttgagtttgaagataaatcaggatgaagcgattcatcaattggatgaaatggcaggcgatgcagatttaatcctcggtcataacatactggatcatgatttaccctggattgccaaacaacgcgtacgtgctcaaatattattagataaaccaatcattgataccctttatttatcaccgctagcttttcccgcaaatccataccatcggctgattaaagactataaactggtaagagatagcattaacgatccagtgaatgacgctaaattatcgcttcaggtattcaccgagcaaatatgtgcgctgcaagaaaagccgctggctcagttgcagctatatcagtatctttttgagcacggcgttgccagccatttcagtacacgtgggatggccagcattttttccgcactgacgggtcaggcgtccatatccgccgtagttttacctacgctagttaaatcggttgctcagaataaagcatgccctaaccagcttaatcgggttattggcgatgctcttaaacagcctttgcgcttactaccattggcttttgcctgtgcctggctccccgtatcgggagggaattctgttttaccgccctggatatggcgccgttttcccgtcaccgctgatatcatccgcgaactgcgtgagcaaaaatgccagtctgaaacttgccgctactgctgtgaaaaccatgatgctcgtcggcatttacagaaaattttcgagctgaacgattttcgtaaacttcctgatggctcgccgttacagcgcaatatcgttgagtacggattagctagtcgttcactgcttgggatattaccgactagcggagggaagtctttatgttatcaacttcctgcgattgtcaggaatctgcgaaatggttctttaaccattgttatttcgcctttacaagcgctgatgaaagatcaagtggataatttacgtcataaggcaggtattaaaggcgttgaggccatttcagggatgctaactttacctgagcgcggcgctattcttgagcaggtccgtaagggggatattgcgattctttacctctctcctgagcaattacgtaaccgcgcggtaaaacaagctatcaagcaacgtcagattagtggatgggtttttgatgaggctcactgtttatcaaagtggggccatgattttcgtcctgactatctgtattgtggcaaggttattgaatctttggcgcaggagcagtctgtgcagattcctccggtattttgctataccgcaacggcgaagttggatgtgattaatgatatttgtcggtattttgacaaaaaattatcgcacccattagctcgtttttcagggggagtagaaagaattaatcttcactatgaaatcattgcaagtaatggcttgagcaaaattagtcagattttgaatttgctcgataaatttttttctaatgatgatgaaggtgcatgcattatctattgcgcgacccgccgttcggtagatgaaatcagcgatgtgttgacccaacagcaacctttaccggttgctcgtttttatgcccggcttgaaaatagtgaaaagaaagaaatccttgaagggtttattgctaaccgttatcgagttatttgtgctactaatgcctttggcatgggaatagacaaagaaaatgtacgtttagtaatacatgcggagatccccggttctctggaaaattatctccaggaggcagggcgtgctgggcgggatacgctggacgcgcattgtgtgctattatttgatgagcaggacattgaaaaacagtttcgccttcaggctattagtgaagtaagctttaaagatatttatgcaatatttaagggaatcaaaaagaaagttaatgaaaataatgaagtcgttgccacaagtattgagctaattaatcatcctatggttaaaaccagtttctctatcgatgataacaatgcggatactaaagttaaaacggggatagcgtggctggaacgtgttggttatgtggagcgacttgataatataactcaggtttttcagggaaaagtggcctttccttctctggaagaagcgcaaagtaagatggcagcgctgcacttgaatcctgcggcgatggttctctggaatgctgttttacaggcgctattaaatgctaatgacgatgacggacttagtgccgacagcattgctgatgaggttgcccaatttcttccgcataaagaaaataatacgtcaggaattgaagcaaaagatgttatgcgcgtattgacacagatggctgatgttggcctggtcaccaggggaatgctgctgaccgtacgtatgcgccccaaagggaaagataatgcgaggatcacaactgagttaattcacaatattgaaatcgccatgttagggctgctgcgcgaagctcatcctgatattgaactggggatgccatggcctctccagattgcggttatgaatcaagagattattcagcaaggctatgatagaagtaataccacgttactacaaaatatattatttagctggtctcaggatgctcgagcaaacggtcataaagggcttattgattttcgttatggtacaaggaacagctaccagattattatgtatcgtgactgggcatatatcgaaagagccattttacaacgtcatcgtgtgacaagctccgtactgaattttatttatcaattggcattggatagtgatgaaagcagtatcaaaaaagtgatgctttctttctcactggaacaggttatcgattatttaagaaaagatgttgatattattccaatgatccaacagagacaggggggggatgagcagcagtggctgatggctggtgcagaacgtgctctactttatcttcatgaacaacatgccattgtgctgcaaaatgggctggctgttttccggacagcgatgagcttgaaattgcaggctgaaaaatcgcaacggtatgtcaaagctgattatgaaccactggctctccattatcagcaaaagacgcttcagatccatgtgatgaatgaatacgccaggcttggtcttgaaaaacctaactatgcccaacggctcgtacaggattactttgctatggatgccgagtcatttgttccactttattttaaagggcggcgaaaaattctcgatctggcaaccagcgaaagctcatggaaacgcattgttgaaaatttgcataatcccgatcaggagcaaattgtgcaggcgagccttgaacaaaatacgttagttcttgccggaccaggctcagggaaaagtaaagttattatccatcgatgcgcctatcttttacgcgtgaagcaggtcgacccgcgtaaaatcctgttgctctgctataaccgtaacgcagcgatttccttaagacgcagattgaagtcgttgcttggtaaagatggcgccagcataatggtacaaaccttccacggattagcattgagccttacgggataccagattgagcggaaagataatgacgaaatcgattttgataacctgctctggaaagcaatagctttactcaaaggcgatgaaacgcagctcgggttagaagttgaagaacaacgtgaatacctcctcggcgggcttgagtatttactagtggatgaatatcaggatattgatgagccacagtatcagctgattgccgcgctggcaggtaaaaatgaaagtgaagatgatgctcgtcttaatctcatggcggtgggtgatgacgatcaatctatttatggtttccgtgatgccagcgtgcgatttattcgtttgtttgaaagcgattactccgcccgtactcattttttaacgtggaattaccgctctacggccaatattattgcatgttcaaattatcttatcagtcataatcaggggagaatgaaatgcgagcatccgatcgtaatcgatcgcgctcgccagatgcttccgccaggcggagagtggagcgcacttgaaccttcggaaggcaaagttgttatccagcattgtaccggcgcggctcagcaggcggcagaagtcgtgcgccaaattcagtatattcaacggctgcagccggaatgccctcttgagaaaattgcggttattgcacgcaatgggctcgacaaaaaggagcttatttgggtccgttcagcccttgcggatgcaggtattccttgccgctttgcgctggagaaagattatggtttccccattcgccactgtcgggagatcgccaattatctgctatggctacgagaaagagcgctcgagtcgctgacgccagcagagctgtgtcagcaactaccggggcgagaccaggcgaaccgttggcacgatattatttatgaattaattgagcaatgggagctaagccagggaggcgagccattacctgccgcttattttgaacatttcatactggaatatttacatgcccagcacagccaggttcgctttggcctgggggttttgctgagcaccgtacatggcgtaaaaggtgaagagtttgagcatgtcattatattagatggaggttggcgtagttcgcactctctgcaacctgaaaataacgaagaagaacgaaggctcttttatgttggcatgacgcgagcgatatcccgacttgttattatgcatgatgatcgtgcgccaaatccctatatcgaacagttagatccagcggtcatcagccatactgctgcacaagccgttgcgcctgggatcttacgtcgtttctcgatcatcggattgcgccagctctatatcagttttgcaggtggacatccggctggtcatcccattcattcgttacttaccgatatgcaggttggggatagcgtccaactggtctctgtcgggaataccatcaaggtgaatgctaatcaatcggcaattgcgcagctttcaagtgccggaaagagccagtggcaattttctctttccgggatccgcaaaattgaagtgcttgccatgctacagcgcagcaaaacactaacagcagaggattatcaagttgcggtgaaagtggacaattggtatgtaccgatattattggttgaaacccgtgaagaagccgcttatgacaatattacttgaagcagaatac

SEQ ID NO: 65 - DNA, 3308 bp, Escherichia coli
tagctattgtgactatgctaaccatatgaatctattgtgtgattatgagtaatgactttttctaatatttgatttttaatgtagtaacttagctaattttaaaatttgtaaaaggatgtttatgtcgatttatcaaggtggtaacaagttaaatgaggatgattttcgttctcacgtttattccttgtgtcaattagataatgttggcgttctgttaggtgctggtgcttctgtcggttgtggtgggaaaacgatgaaagatgtatggaaatcgtttaagcaaaactaccctgagcttttgggagcacttattgataaatatcttctggtttcgcaaattgattctgataacaatttggtcaatgttgaacttttgatagatgaagcaactaaatttctttctgtagctaaaactagacgatgtgaagatgaagaggaggaattcaggaaaatattaagttcattatataaagaggttacgaaggctgcattattaacaggagaacagtttagagagaaaaatcagggtaaaaaagatgcgtttaaatatcacaaagagttaatttcaaaattaatttcaaatagacagcccggtcagtcggctccggcaatttttacaacaaattatgatttggccttagagtgggctgcagaagatttaggaatacagttgtttaatggtttttctgggctacatacacggcagttttatccccagaattttgatttggctttcagaaatgtaaatgcgaagggcgaagcaagattcggacattatcatgcgtatctctataaattacatggctcacttacgtggtatcaaaatgatagcttgactgttaacgaagttagtgcatctcaagcatatgatgaatatattaatgacataatcaataaagatgacttttatcgcggtcaacatttgatttatccaggggcgaataaatatagccatacaatcggcttcgtttatggagagatgtttagacgttttggggagtttatttcgaaacctcaaacagcgttgttcataaatgggtttggtttcggtgattatcatataaatagaataatattaggcgcgttactgaatccatctttccatgttgttatatattatcctgaattgaaagaagcaattaccaaagtaagtaagggtggtggttcggaagctgagaaagctattgttactttaaaaaatatggctttcaatcaagtaactgtagttgggggaggaagcaaggcatattttaatagtttcgtagaacatctaccataccctgtgctctttccacgagataatattgttgatgagttggttgaagcaattgctaatctttctaaaggagaaggtaatgtccctttttaaacttactgaaatctcggctattggatacgttgtaggattagaaggggaaagaattaggataaacctgcatgaggggttgcaaggcagattagcatcgcatagaaagggggtgagctcagtaacgcaaccaggagatcttattgggttcgatgcaggtaatatattagttgtcgcaagagtgacagatatggcatttgttgaagcggataaagcgcataaggcaaatgtaggcacatctgatttagctgatatacctctaagacaaattatcgcctatgcaattggctttgtgaaaagggagttaaatggttatgtttttatatcagaagattggcgcttacctgcattgggttcttctgctgttcctttgacttcagattttttgaacatcatttatagtattgataaagaagaactcccaaaagcggttgaattaggtgtggattctagaactaaaaccgttaagatatttgcaagtgttgataaattattgtcgcgacacttagccgttcttggtagtacaggatatggtaaatcaaatttcaatgctttgttaacgaggaaggtttctgaaaaataccctaactcaagaatagttatttttgacataaatggtgaatacgcgcaagcttttacaggtattccaaatgtaaagcacactattctaggggaatccccaaatgttgatagtttggaaaaaaagcagcaaaagggtgagctatatagtgaagagtattattgttataaaaagataccatatcaggcattaggttttgctgggttaattaaattattaagaccaagtgataaaacacaattgcccgcattaagaaatgcattaagtgcaattaatcggactcattttaaaagccgtaatatttacttggaaaaagatgatggtgaaacttttcttttgtatgatgattgtcgtgacacaaatcaaagtaaattggctgagtggttggatttattaaggcgtagacgtcttaaaagaacgaatgtatggccaccgtttaaaagtttagcgactttggttgctgaatttggatgtgtagctgctgaccgttctaatggaagtaaacgtgacgcgtttggttttagtaacgtgttgccattggtaaaaatcatacaacaacttgcagaggatataagatttaaatctattgttaatttaaatggagggggtgagctagcagatggtggaacgcattgggataaagctatgagtgatgaagttgattacttctttggtaaggaaaaaggacaagaaaatgattggaatgttcatatagttaatatgaaaaatttggcacaagatcatgctccaatgttacttagtgcattgttggagatgtttgctgagatactatttagacgtgggcaggaacgttcgtatcctacggtacttttgttggaagaagcgcatcattacctgcgtgacccttatgctgaaattgactcacagattaaagcatatgaacgacttgctaaagaaggtaggaaattcaaatgctctttaattgtcagtactcagcgaccctcagagctttctcctactgttttggcaatgtgttcaaactggttttcgttacgtttgactaatgaaagagatttacaggctctcagatatgcaatggaaagcggtaatgaacaaatcttaaaacaaatatcaggtttaccaagaggtgatgctgttgcatttggttctgcatttaatttgcctgtaagaatttcaattaatcaagcaaggccagggccaaaatcttcagatgctgttttttctgaagaatgggctaattgtacagaattacgttgttaattacctgatgtacatggctagtgcaagttggtagcgcatgtctatatgcatttatttgcatgtgttttattgagtgagcgcacaagcttgatgacccgacaggtatgtatttagactgaa

SEQ ID NO: 66 - DNA, 3419 bp, Escherichia coli
gtgcgccttatgtgattacaacgaaaataaaaaccatcacaccccatttaatatcagggaaccggacataaccccatgagtgcaatagaaaatttcgacgcccatacgcccatgatgcagcagtattgaaaaatataacatatccaactgattgtattgaaaatttaaaatagccatataacaaaaggttacacataagctactttttggggtttcaggcaagaaactaaaaattattaacgccatcaaattattcacatcttaataattagcattgaaatttaatgtttttggttctttgtacatgtcaatggcttgtctttgtggcagaatcataaagctatgcaatcattgcattgttattaacacagcatatttttatatacttttaacaccttacctcaaaaaggataacaaagtggacagaagtgcggttgatacaattcgtgggtattgttatcaggttgataaaacgattattgagattttttcgttaccacaaatggatgactcgattgatatagagtgcattgaagatgttgatgtctacaacgatgggcatttaactgcgatacaatgcaaatattatgaaagtaccgattataaccactccgttatatcaaagcccataagattaatgttgtcacactttaaggacaataaagaaaaaggggctaattattatctttatgggcattataaatccggtcaagaaaagttaacactcccattaaaagttgactttttcaaatctaatttcctcacctacaccgaaaaaaaaatcaaacatgaataccatattgaaaatgggcttaccgaagaggatctacaagcctttttggatcggttagttataaatatcaatgcaaaatcatttgatgatcaaaaaaaagaaactatacaaataataaaaaaccatttccaatgtgaagattatgaggcagagcattatctttattctaatgctttcagaaaaacatatgatatctcttgtaataaaaaagatagaaggataaaaaaatctgattttgttgaaagtatcaacaaatcaaaagtcttatttaacatatggttttatcaatatgaaggaagaaaagaatatttaagaaaattaaaagaatctttcatacgcagaagtgtaaacacctcaccttatgctcgttttttcatcttagaatttcaagacaaaactgatataaaaacagttaaagactgtatatataaaatacaatcaaattggtctaatttatctaaaagaacagatcgaccatattctccttttttactttttcatggcaccagcgatgccaatttatacgaattaaagaatcaattattcaatgaagatctaattttcactgatgggtacccttttaaaggaagtgtatttacccccaagatgttaatcgaaggtttttcaaataaagaaatccacttccaatttatcaacgacatagatgatttcaatgaaacactgaacagtattaatataagaaaagaagtttaccagttttatacggaaaactgccttgatatcccatcccaactaccccaggtaaacatacaagttaaagactttgccgacataaaggagatagtgtaatgagcaggaataatgatattaatgcagaagtagtatcggtatcgccaaataaattaaaaatttccgtagacgatcttgaagaatttaagatagcagaagaaaaattaggtgtaggatcttatttaagggtttcagataatcaagatgttgctcttctggcgatcatagataatttttctattgaagttaaagaaagccaaaagcagaaatacatgatagaagcaagtccaataggtcttgttaaaaatggaaaattctatcgcggtggagattcacttgcacttcctcctaaaaaagtggaaccagcgaaattagacgaaataatatccatatactcagatagtatagatataaatgaccgttttactttttcaagcttatcgcttaataccaaagtatccgtacctgtgaatgggaatagatttttcaataaacatatcgctatcgtaggttcaacgggttcaggtaaatcccacactgttgcaaaaatacttcaaaaagccgtagatgaaaagcaagaaggttataagggattaaacaattctcatataattatttttgatatacattctgaatatgaaaatgcattccctaattcaaatgtattaaatgtagatacattaacccttccatattggctattaaatggtgacgagttagaagagctttttcttgacacggaagcaaatgatcacaatcaaagaaatgtgttccgtcaggcaataacattaaataaaaagatacattttcaaggagatccagccacaaaggaaataataagctttcactcgccatattatttcgacattaatgaagtcatcaattatattaacaatagaaataatgaaagaaaaaataaagataatgaacatatttggtcagatgaggaaggaaatttcaagtttgacaatgaaaatgctcataggttattcaaagagaatgtaactcctgatggaagttcagccggtgctttaaatggaaaacttctcaattttgttgatcgattacaaagtaaaatatttgataagagattagattttattctgggtgaaggtagcaaatccgtaacatttaaagaaacattagaaactttaataagctatggaaaagataaatcaaacataacaatacttgatgtaagcggtgttccttttgaagtacttagcatatgtgtatcattgatatctcgattaatttttgaatttggctatcattcaaaaaaaataaaaagaaaatctaatgaaaaccaagatatcccaatattaattgtttacgaagaagcacataaatatgctcccaaaagtgatctgagcaaatacaggacatccaaagaagcaattgagaggattgcaaaagagggtagaaaatacggagtaacccttctccttgcaagtcagagaccttctgaaatttcagaaacaatattttctcagtgtaatacttttatctcaatgcgattaactaacccagacgatcaaaattatgttaagcgattactcccggatacagtaggtgatattacaaacctcctaccatcgctcaaagaaggtgaggccttaatcatgggggattcaatatcaataccttcgattgtaaaaatagaaaaatgtacaatacccccatcgtcaattgacatcaaatatcttgatgaatggagaaaagaatgggtagattcggagtttgataagataattgaacaatggagtaaaagttaatttcagaagtggattcactcttgctcaagagtgaatccactaatatcatatcctaatgatatagtttaataaaatctattctggaatcattaggctgagag

SEQ ID NO: 67 - DNA, 7655 bp, Escherichia coli
ccattttttaaaataccctcttaaaggagggtattttaaaattatttgttttaataaaaattaaatattatattcattatcacaaccaataaaccgtttattttttacacttgcatactataaagacatgaaagatcccccttgtcaggactacgctaaagataataataacgtctattttcgtcatatataatatttgcttgttgcatttctaaaaaaaaagagtaaaatatcaaaatttaggagttacttttggacttatatgaaggcaattgacttatttgcgggggctggagggtttagtttatccgcccacaatacaggcgctatagatgttgttgctgctatagaattcgatagcgcggctgcaaacacctacagaaaaaatatgttagaaaggcttgagcataagaccgaacttttacaggaagatattttactcgtaggcccaaaaaagttaagaaaaaaaataaagctcaagaaaggcgagcttgatatgatacttggtggacctccgtgccaaggtttttccagtcatcgaattaatgatgctggtgttgatgatcctagaaataaattacttttaaggtatttcgattttgtttgtgaatttaaaccaaaagcttttttggtagaaaatgtctccggtttgttatggaagagacatgaagcccatttgaaacgctttaagtttttggcttccaaaaatggttatactttaattcattgcgatgtattaaatgctcgtgattatggtgttccgcaaaatcgcaaacgagttttcattgcaggtgtcagaaatgacattttaaaaaaaagaaataatattgagtttccacctcaagctactcatttcaaccctaattctaatgaagtaaaaaacaattcaaaaaatacgtggagaaccgcatcctctgtttttgagaagatgaatgataacttaattcaaagatatatatctgaatactttcttaaacatacttcttactcaattgatgaagcacaagagctacttgaaaacctagaatatcaagacgcacccataagcgaaaaagatccatgcaacatacatatgataccaactgagcgtatggaagagcgtttcagagccacaaaactcaatggcagtagaagcgatgcaggaaaagaatttgagctaaaatgtcattccaatggatacgcaggccataaagatgtttatggccgcataatgattcacctcccagccaatacaattacaactgggtgtaacaatccatctaagggaagattcattcatccatgggaaaatcacggcatcactttaaggcatgcggcaaggttgcaaacgttccctgatgactatattttttggggtaatgcgacagagcaagcaagacagattggtaatgcagttccccctatgttaggcacaatattaataaatgcattacttaacataattgcacccaatagataaggtgtaatgtatgaaaaatatcaaaattagaaacttaaatggaccaaaaaatcatttgatgattacttaccttataataatagaaggtgaaaaatggtaatttcagcagcttttcaaacaagagcaaggacaattgatcatctagggcgtgagcaaatagctgattgtccaaccgcaatttccgagctttggaaaaatgcatatgatgcttatgctcgtaatgtttctctaaatatatttgacggcaatacacctgtggcaactttagttgatgatgggcatggcatgtcgttagatgacattatcaataagtggcttacagtaggaaccgaatccaaggctacaaaaaaagatattccatatgaagatagaaacggaatagatcatattcgagcaaagcaaggtcagaaaggcatcggtcgtctttcttgtgcggccttgggctcattaatgcttttagtttccaaaaagaaagatagccctcttgtagcttgcctgctcgattggcgtatatttgaaaacccatatttgatgcttaatgatataaagatacccattatggaatgcagtgataacaatgaattaatcactgttataccggaaatgtttgatgctttgatgggaaatctatggggtgatggtgatgatatattacgagataaccgtattgaacaagcttgggaaaattattctgaattagaaagaaatgaaaataattatattacaaaagaagctatcgagaatactgtaattaatgctttttttgaggaaaggcattttcaatcttggcctgtgtggaataataaaaccactcacggcacagccatgtttatagctggaattcatgacgatttaatagctcagctatcaacagatgctggttcagaagctcaaggtgcagaggttcgggctaaagaacgctttcttcaaacattaaatagctttgttaatccatttaaaagagaaggcgaagaacagattactgatttcaatacaagtgttgtcgcatggaatggtaatctgcaacgatttatcatcgatgaagttagaaactttgatatttcaaactttgaccagctagaacatatagttgaaggaagtattgatgaaagtggattattttccgggaaagtgaaagccttcggagaatggtttgataatattacagtcaaacctaaatctgcatataagaccagaaaagatactcgctttggccctttctttttaagattaggcacatttgaagttataagaaaaaatagtacattatcagatgaacagcatgcaaccttcgaccgtatccgtgatcagtttggtggagtaatggtttttcgtgatgatttacgtgttatgccatacggacgtgaagataatgacttttttgaaatcgaaaaaagacgttcaaaaaatgctggtttatatatgttcagtaatagggcatgttttggtggtgtatgtataacgaaagaacataaccccaacctacgagataaagcaggtagagaaggtataattgacaataaagcatctaagttatttagagagatagtcgaaaacattttaatagaaattgcaaaaaggtttattggccgcgcatcaaatatacgagatgaaaagctagaggaaataaatgctaaacatgctgctttgaaagcagacgaagatagaaaaaaattattacgtaaagagcaaagaagaatcaaaacatcgattcaaagagatcgtatttctttagaacatttaagaaatgaattttatgaaatatcacagcttctaagcgacaagaataattttaaagaactagaggagctattacagctcaaagaaaacatcgacgtattggatggtaccctaaaaaacctatctttaggttcagtaccaagaaatttagggagtatagagaaagactaccgtcagtatcgcgatttagagattgatgctaaaagtcttttaaagcagattaataactctgtatactcagcgcttgatcattttactgttaaagatgattattcaattgctgagaaagactttcgtagcaaagcagccatattacatgcgaaaataagaaaattttccaataaaggacgcaatatattaaaagaagagatgttgcgtttcgaaaagataacaaacaatacaaataaagctttccatgaaaaaacatctcaatatttatccgatctacaagaaaatagaacttcactcaaaaaaacacttgaaaatttagatcttgcttatcagattcaagacattgaaataggtcaaacctacgccccatatattaccgcattagaaagcttaagagaggaaattgatttagaaggcctcgcgatctcttcagtcaacgaaaatacacggttgaagaaacaggtagagcaagtgaatgcactcgctcaacttggaataactgtggagataattggtcatgaaatcgaaggtttcgatatgactattgagcgaggtataaatagactgtcatcaacaaacctcgatgaatatcagaaaaatgctttatcaagtattacccaagcacatcaatcattaagcgattcttggcgttttttaagcccattaaaattatcaggagataaggtaagagctttcttgagtggaaaagatatttttgattatgttaatcattttttcaacagtaaatttgaaaaagattcaattgaattttcttgctctactaatttcctagatatttcattatatgatcaaccagccagaatttatcctgtgtttattaatttagtaaacaactcacgatattgggttaaagaaactaaagaagagcgtcgaattattaggttagatgtacttgatggtttgatatatgttagtgataatgggccaggggttgatcctgatgacgtgtccgaacttttcactatatttttctccaagaaacaaagaggtggtcgcggggttggcctttatctctgcaaacaaaatttagcggtgagtggccatagtattttctacgaaacaagaacagagaaaaaaatactaaatggtgctaattttgtaattaatttcaaaggaattaaaaatgcttgataattctactttcgattacaaaccacatttaaaatctgcttatattgatccgattagaactgtgacagtcatcgatgatgaatacccaactattgatgatttaatttcaccgaccaaagacagtttttctcaagacaacatttctcgattaaaagatattattgatataagtcgaagtgaagaatataattggcttttagatgtctataatggaaaagagaagaaaattcaagagggaaccgtatctaaccgtctttatcacagtgatctactaatcttggactatcatttagatggagaggactctggatattgtaaaaaatctatagatattattaaaaatctatctgaaaatcgtcattttaatattgttgcagtgcatactaaaggttatgatggacaaaagggttcagttaatgaggtactaatcgatattattacttccttacaggaaagacccgctattagtattttaaatgataaaatcaaatctagaatagatgatgctttagatgaatgggaaatcgaagatccaagtatcagggaagatctaattaattcagtttctacattagatttacttttcttgattaataaattcgggtcaaatttaagttcaggatgtttcgactacgaagttcttgatgtttttcataatatatttgatcaaaaaccagacaatataaacatatccaaaatattgatttttaaatggatctcatcagaaaagttacatagatacgctgaccaatttaataataagacatcaaagttctttgattgggggacaaatgaaaaccacaattggataaaaacagaagacttatttattactgtccttggtaaaaaagacacaccaatcagtgacataccgaatcaacttttggaggctttgtcaaactctaaaccacatccgcacaaacttattttatcaaaactcagaagtgaaattgaaagtaatggtagctatgctgcaagtaatataattaacaaaaaattcttacaggcggcgtggctaaaggaattacttcaaaaagaggatgaatatgctatcaaaacagctgcatggcaagcagtaactaaattgtgggaagaattagcatacgaaataaaacagagtcttgatgattttacaattaatcttgtccgcgacttaaagaaaattaactcacctttaaactatttcatagagaaatctacacttgatgctgaacttgaacaaattaaacatgcaaattgtttcagttgttcaaaaaaaataactgctcatcatttggttacggggcatgttttggagttcaataataatcactggttgtgtctaactcctatgtgtgaccttgttcctggtcagaaaaacggaaatagtttactccctgttacgctcgtgaaaatgtatgatgcgaaagttgctttaaataatacacgtaaaaatatgcaaaacgagcttaaactacccaatttgccagaaatcaacgaagatgaatcaattagacaaatactaaattattccacacagaataatctattgttcgttcagtctgaacatgacgggaaaatacatattcttagtttcaccgttggactcgatggcaaggcaaatcctaaagcaatggattgctatgtggaaaatcaaggtattttctctgaagataaaataatagcactaaaatatgccaagcccactgaaaatgaaatgaacataatatccgtagaagcaaaaatagttgctgaattacgctacgaatatgctttgaatttattaggtagactcggtgtatcaaaatctcgagtcggattagattttatcaactaaggtgcgttagcacgcacctagtctgacaggtaccagttgtttatataggtatctgtcagactacatcctctttaggtttctctcgcccagataattttttccatcaagtgacattttcattgatgtctaactctcagacattaaagtgtctaacttccttattaatgtcacaagcaacaattgaatttcaccgcttttgcgagcatgatcgcaataatatcagcccgttacccggttaattcctatgacatcactcgaaacactgcaatcggctatctctaacgtctctgtatggcgtcagggtgatgtatgcgcgccgcataaaccgttgctgctgctgtatgtgttgtcacagtacaaagcaggccacccgcgcctgtttaactacggcctagagatccacgaaccactcactcgcctgctaaaagagtttggccccaagcgacgcactgactatcccaatatgcctttctggcgactcagaactgacggcttctgggaaattgctaatgcggaaggctgcaaaccccgtagaggcaacacccagccgacaaagaaagagctgattgataatcaggtagcggggggttttgatgaaacagcttaccagcaactgcttgcacaccctgaagtaattgaccaactggcccagcagatcctgatggatcgtttccccgagagtattcagcggatcctcgccaaccaactgggtctggattttatcgaccgttcaaagagccgcgatccgcgtttcagggatatcgtgcttcgggcttaccattcgcgatgtgctttctgcggttacgatctacgactcgatggtgcgctggttggtattgaagccgcccatattcactggaaaacctatggcgggccgtgtgtggtaaacaacggtctggcgctatgttcgctgcaccacgatgcttttgatatgggcgcattcgggctggatgaaaaccttaccatccgcatctccggcggcgtcagccgtagcccggtggtggataacctgttctggcaacggaacggccagcagttacaccttcctcacgacaaatcgctgtggcccactgaacaatacgtcggctggcatcgtaaacagatcttcaaagcctgagaccgtgagcttcgcaggtatcatcgattgcccaaactgctttatcccctacaacggataaattgcttttaacccctatagcggataaatccagcacaccagtgttggacttcagaataacgaatccaaactctagccctgagacaccaggctcttgattattattgataccgtattaatctgtacgaagtttgacccgc

SEQ ID NO: 68 - DNA, 6042 bp, Escherichia coli
gtaacaccgttgaacgtcggctgggtgttgttcataatccctttaaaaggtctggggatggccatgacctcagggcggtagcgtgaccaaagttcatatccataccaattatttttatttaaaatatcaacttattcgagttgttttatttagttcaaagaaggtatcaaattgatagttatagattttttttgtggctgtggtggagccagtgaagggctacgtcaggctggctttgatatcgagcttggattagatattgaccaacaagcatcagaaacatttaaagctaatttccctgatgcaaaattcatccaagatgatattaggaaaatcgaacctcaagatatctccgacatcattgatattaaagctaaacggcctttgttactgagtgcatgtgcaccatgtcaaccattttcgcaacagaataaaaataaaactagtgacgactcaaggagaaatctactaaatgaaactcatcgttttattagagaacttcttcctgaatatattatgcttgaaaatgttcctggaatgcaaaaaattgatgaagaaaaagaaggcccatttcaggagtttattaagctacttaaagagttagagtataactatatatcttttatagccaatgctgagaactatgggattccccaaagaagaaaaagactcgtgctcttagctagtcgagtaggtaaagttaccctaccagagataacccatggtaaaaataaaatcccattcaaaactgtacgagattatatccaggacttcacaaagttatgttcaggagaaaccgaccccaaagatcctttacatagggctggaacactgagccctcttaacctaaaaagaattatgcacactccagaaggaggggatagaagaaattggccagaagagttagttaataaatgccataaaaattatgatggccacacagatacttatggaagaatgagttgggataagcctgcgcctacacttacgacgaaatgtaatagttactccaatggtcgttttgggcatcctgaccccactcaacatagagcaattagcataagagaagcatcaagattacaaacatttcctttaagctatgtttttaaaggttcgctgaattcaatggcaaagcaaatcggcaatgctgtaccttgcgaactcgctagactatttgggctacatctcatagaaaattgtactaataaggattcatagatatatggctaaaataagaacaaaggctcgagctttggacatgcttggcagacaacaaattgcaggtatacctactgccttgagtgagttatttaaaaatgctcatgatgcctatgctgataatgtcgaagttgatttttttaggaaagaaaatcttcttatcttgagagatgatggattaggtatgacaaccgatgaatttgaagagaggtggttgactattggaacctccagcaaattaatcgacgatgatgcaattaataaaccagcagtggatagtaataaagcctttcgccctatcatgggagagaaaggaataggccgtttatctatcgcagcaattggaccacaggtgctggttcttactagggccaaaagagacaatgagcttaagccattagttgctgcatttgttaattggagtttatttgctataccatcacttgatcttgatgatatagaaataccaattagaactattatcaacgacgaatgcttcactaaaaaaactcttgatgagatgattgagcaagcaagaaataatttagactctttatcacacaaaatatcaaaatcaaaagtatcacaaataaatacacaattatcatcttttgaatttgatcctattctatgggaaaaaaaattaggtgggctaagactatctggagatgggcatggaactcacttcataataatgcctaccgaagaaatattaatagatgacatttccacgagcgatagcaataaaacatcagagcagtcttctcgcttagaaaaagctttattaggttttacaaacacaatgtacagtgattcaaaccctcctattatagctcgttttagagactatctggaagatggtgagtgcattgacagaattagcgaatcaattttttttacaccgcaagaattcaatcttgcagatcaccacattgaaggatggttcaatgaatttggtcaattcagtggaactgtttctgtttatggtgaagagccaattcatcatgtcgtgacttggaaaaataataatcaattaacccaatgcggtccatttaaaataaaattagcgtatattcatggtcggcttcgtgattcacgcttacccatggagttgtgggcccctctgaaggagaaaacagatagatatggtggtttatatatctatcgagatggattaagaattttgccctatggagattcagatacggattttctaaaaatagaaaagagaagaacgttatccgcttctgaatattttttctcatatcgacgtttgtttggagcaatagaattaacaaaagaaaacaatgcttcattagttgaaaaagctgggcgagaaggattcattgaaaataagccatataaacagtttaaagaaatgcttgaaaatttcttcatcgaaatcgcaagagatttctttaaggacgatggcgatatgtctgaattatttgttgagacaaagcaacgtagaaatgaagaacatgatttgttatctaaaagatctaaacaaactaaagctaaaaaagatagattaaagaaagatctgtatgatttttttgataagttagataatgattactggaatattgaaataaataagctaatcaataaaaacgaggaatatttctccagtacagaaataacagacaccaatatagattatgtatacaataaaattaaagaacaaaatgatgctatcattaaaaatctacgtaattctgtggatataaagaaaccctctggagttggattaacaaaagagttatctaatttatgggatagatatcaaatagaaagacaaaaaatactgttatcactaaatgagctaaaagataacgttgatagaaagcttatagaactggataataaaaataatgattttctcaacttacggaagagacttgaagattctttgaatctacaacaaagttactatgaaaaagaactaacaaagttatataatgacgctaaaaatgctttgaaagatgtgcaatctaaagcaaataggttaatttctgataataagaaaaaacataagagtgaactaaaaaacatttcttatgaattccaatcaactaatctcaatggcaaagatactgcgtatatattggatgtaaaaagaaatctagaaagtaaaattgagaatacttcaaacgaagtgattaatgaaataagaaaactaaccgaccagattgcaataattagtgatagtaccacttctgaaaatttatcatcggctcaagtaactgaagcaatcgaaactgaacttgaacatttacgagaccaacaagcaaataacgcagagttaatactacttggcatggctctttctgtagtacatcatgaatttaatggtaatattagggcaattagaagtgcgctaagggaattaaaagcatgggctgacagaaatcctaagcttgatattatataccaaaaaatcagaactagttttgatcacttagatggttatttaaaaacctttacaccattgacaagacgtttaagtcgctctaaaaccaatataactggaactgccattttagaatttatcagagatgtattcgatgatcgtcttgagaaagaaggaattgaattattcactacctcaaagtttgttaatcaagaaattgtaacttacacatcaaccatttaccctgtctttataaatctaattgataacgcaatatactggcttgggaaaacaactggagaaaaaagacttatacttgatgctactgaaacaggatttgttattggtgatactggtcccggtgtttcaactagagatcgagatataatatttgatatgggatttacacgaaaaacaggagggcgtggaatgggattattcatttccaaagagtgtttatctcgagatggatttactataagattggatgattacactcctgaacagggtgctttctttattattgagccatcagaagaaacaagtgaatagcggatataaataaatgacaagctctactgattttcataaactttctgaagactgcgttcgccgttttttacattctgtagttgctgtagatgacaatatgtcttttggagctggtagtgatactttccctacagacgaagatattaatgctttagttgatcccgacgatgatcctacaccaataataacagcatcagcatccccaaggatagaatcaactaaatcaaaagcaaaggtaaaaaaccatccttttgattaccaagctctagcagaagctttcgccaaagatggtattgcttgttgcggattattagctaagagttttaatgttgaagaaagagatataattacagcatcatcccacaaggcagatataacaatacttgactgggatatgcaaagcgatagtgggcaatttgctattgaaataataaaatcgataatcgtttcagatataaattctggaggacgtttacgtcttctttctatttatactggtgaacatgttactgctgttataactaagttgaacaatgagttaaagaaaacataccgtagcgtaataaaaaatgatgatagtatttttattgaagataactatgcactcgaacaatggtgtatagttgttattagtaaagacgtttatgaaaaagatcttccaaatgtgttaataaaaaaattcactaaccttacagctgggttgctatccaacgccgcactctcttgcatttctgaaataagagaaaaaacccatgggatattaacaaaatataataataaattagacactgcatatgtttcccacatcttaaatttaataaaatccaaggagtcaagggcatatgcttatgaaaatgctcatgattatgcagtagatttaatttctgaagaaataagatcaatattgcaaataagtgaaaacttaaagaaatctctaagcaaaaactccttatcccattggcctatttttcactatgcaaaaaatggttgtaagaattttctattaactggaaaaaaacaaaaagacttatcagtagaacatctaaggaatatactctctgctgattctttagaagaaattcaacacgctattgaacacgcatctttaggtaaaaaggaatacttaagccaagatggtgaagaagataaaaagttaatgcaattatgctctctggaaatcacgcgcaggagtttaagatatcattctcatatagataatgtgtccttaaaacaaggaactttacttttagatgcatataattttgtctatctatgcatacaaccattatgtgatagcgtcagattgcatgaaaaagccgattttttattcctcaggggaacactggacgataataattacaatttgttaatcgaagatgaatatggcggtttttataaaattaaaatgccggcaaaagcttctaatattatttcattttcatttggagtcgaaaatggaaacggtgtcatcatagggaaaaagaacaatctagttaatactgactatatctcattcgttcctttactcgttgaaaaaatatctactccaaaagtattgaaatggatcggggaaataaaaacaacgtacgcgcaaaaaataacaactgatattgttgctaatctgtcaagaataggtttagatcaacatgagtggttacgaataaaatcaaaagatatataaatgattatatatgccgtcgttttataaaaactggcggcatgtatatctagttagtccatcatagaagtcaagaaatttagtttgccctatatcttatagaaaatatattttatatgcttaaaaaacaccatctttataagatggcatttatgtgctttgtttcgatcaattacaactg

SEQ ID NO: 69 - DNA, 4755 bp, Klebsiella aerogenes
gattattatccagcctttgcgcaggagagggcatgaactgctcactctgatagccgctcttgccatagttgagcttactccacaaaagtagacacattctgttcttacctagacgcctgctcaaaggcggccgggatgactatagcggtgatccagattgtacctgatccctatacatgatttgtatcattgtcaagctttttgaacgatttaatctcttattggagttcatgatagccacttgaatttcgaaaataaggtactatatctagtaaagtcttagtcaatttttggtatatacagtggaagtggaaccatttcgtgtcctttgtttagatggcggtggaatgcgtggcgtgtatcaggcgacgtatctcaatacatttgcacagcgtctgcataactctggtgaaggagtcttagatccaggaaaggcatttgatttaattgtgggaaccagtacgggaggcatagttgcctgtgcgctagctgcgggggtctcacttgaaaaggttcttgcactttatcaagtgcatggcggaaaaatattccctcggcaacgattacgtgcactacctcgagtggggaagtatgtccgtggcctattttctggtcttgcgtctggcgaccaggctctgcgagcagtcctttctgattcattcggtaccgaaactatggggcaggtctatattcgtcgtggaattggtttagccatcactacagtggatctgaataggcatgctgccacagtttttaaaacccctcatatgagtcgtcttaatggacgtgacaacgatcgactattagtcgatgcctgtatggcgactagcgccgcccctatcctgagatcaatagctcgtctaactgaacctggcggtggagccactgttgattatgttgatggcggtctctgggcaaataatccgggggctgtcggcatgatagaagctcatgaaatccttcagcagagaggagagattgaacgtccgattcatttatttatgctcggtacgcttccattgcaaggaggtgaagaacttaagagcgcagataaattacatcgaggtgttttggggtggggagcagggattaaggccatcacagtaagtatgaattcacaggcagttgcgtacgactacttggctcggaaaatcgcagaattgcgaggatatggaagttttgcatatcgactcccagcacaatgcccatcaggagaactccagaaatatttggaaaatatggacgatgcacgtcctagggtgcttaatgcgcttgcccgacaagccgtctcagatgttgattacgcttgggctacggcagaatcagtaagtaaaatgggcgcgtttcgaactgcattggcaagttcgtccaattatagttgtcataaatccgaggaacaccatgaccattattgattgtaataaagagatgagagggtatcactcagaagaggtaaacctctcgaatgcagagcaggcagaaatgcgcggccgccgcgacaatggtcgaacaaggctccgaaacggattgacaaaggctggtcatcctttgccgaaggagttcagttctcaaggctcttatgcgatgcgaacaatggtccaggatgatgcatgtgactacgatattgatgatggcgcgtatttcgataaagaagaccttaagaactctgaaggcgattatcttagtgcgctagatgttcgtaagcgggttcggaaagcattgaaagacgaccgattggcatatgatgcggttgtcaaaaccaattgtgtgcgtcaaatgtatcccgatggatatcacattgatatccccatttatcgtacgacctgttctaaagatatttgggataatgacatcatagagtatgaattagcaagtggcgacgaatggaccaaatcagatgcacgtaaggtaacgagttggtacaacgatgcggttggtaatgaactgaaagcgggggaatctgataccagtcagatacgcaggatcaccaaacttactaagaaaatggctaggagccgtaatacctggaaaaaaaagacaaccagtggcatttgtatttcgaagttagttgtagacaatttcgttgcgcgctcaaatcgtgatgatgatgctttgcgtgatacctggaaggcaatcaaattgcagttagaagtcagtcaacgtattacccacccggtgtttacggacaaaaatcttgctgaggaaggagacgaatgcgttatttttttccgggaatgtttgggtgaggtgctggaaacattaaaggtgctcgacgagcatgactgcacaagtaagaaggctggcgacgcttgggatgaggtgtttaatacaacttattttagcgcccagtgtaccacggataacactacatctaaatcgctgctacggcctgcagttgcggccactgctagcctgtctttccctagttatcccgtacaacctaacaaatcatcggggtttgcctgatgaagtgggctatagacgatcccgtgcgtttcctgagggagaaggatgaactcacacatcttgaaaccgagacgggttggctaagcacggcttggcgtatatctgaagagggctcgatcaccgttgatatcgacatgtttatccatgggcgattgtttgctggggaaatgacatatccggacgcgtttccggattctccgccctacatacgtccgcgagataaatcagagcgatggactaaccatcaatatggcgtgggtggttcactgtgcttgcagtggcgggcagataactggcatagtaatgtgactggtgcagatatggtacgcagtgcgcacgagttgctgagtacagaacagcatcctgaattacctcattctgttccctctgcgcatcgcttgacggaggggcaaaaccttaatttcgtatttcgacgttatgtccctacctccgaagtcgaaaacatatttactatgctcccacttcagtctagaacccgaatatcatcttcaactgtgtataacgaagggtcggcggtaatgttcacagccagagtcgctgacgaacaggatgagcttcgaaatgttaccgatatccctcaagggctcatcgattttgttagtattttgtcgttgtcctatgagggctgggtctttagaagcgactactttagccagaggcaatccttagaatctgtagaagcattaatccagatattgatgatggccggttttaacaccgatgacattctggttaaggaaggggataagttcaaggctaggacgatcatattattaggcaaggaatggtcatcactgcgagtattcctgttagattctggggagcaaccagtgctgcgggagcatcgagttgttagatctccgaactcaaccttaagactttcggaagaatcacagaagttgagtaagatccgcgtaggaattgttggactgggatccgtaggtagcaaaattgcaatttcacttgctcgttcaggtgtcagacaattcttattagtcgatgacgactatctcacgcctggcaacttggtgcgtcatgagttggggtgggcccatgtgggagctcataaggcacgggccgtaagcaatactttagcgcttatagcggctggtgtgaaagtggatgtaaagactatgcgtcttgcggggcaggaatcggcggtgacagcagcggctgcactaaaggatctgtctaattgcgacttgttgatcgatgctacagctaatccagaagtttttttgctgttagctgcgactgcccagcgaaatggaataccgatgtgctggggggagatattcgcaggtggttacggaggcatgatcgctcgagcacgtcctaaacacgacccaaatccattagctgtgcgtgacgcttaccattcttatctctcaaccctccctgaagcaccatttaagaatatggctagctatgatgggagtgatgaacaaccacttatagcatacgacagcgatgtgggctttattactactgcactgacacggttggctgtggatactgctctatgcagagagccaagcgaatttccgtactctttgtacttgctgggtatgcgacgtgaatggattttcgaggagccatttgacacacggccagtcgaaataagtggagaaggctgggaacgcgacgaaaatgctgtgagagatgaagatagggtcgcagttgcaaaggcattggtaaatatgtttcaaggaaaacaaagtgctaacactgatcctacctcctaagcagcatgagttaatgatgactgcactccaaaatgctggtcaacgcgaagtcggcgggattcttatgggtgaacatgtcgggacaaatactttcatcgtccgggagataactatacatcgccgtggtacgtttgcttcctttgtacgacgtattgaggatgctattggtgggctccgtgttttttttaaaggaactggatacgattatgttcgcttcaattatatcggtgagtggcattctcacccttcatttgagccatacccaagcagaacagacgatctgtctatgttacagattgtaaaggatgaaaccgttggtgcaaattttgtggctttgttgataatcaagctcggacctgatggaaaaatggtttcaacagtccatacatatcttcccgatggttcgaagattctctcaactcttaagattcagccttaactcagaatgtcagattgtgaaattcatcttctagaggctaattgaagcatgctgattattttttgaggcggaagtatgttgcct

SEQ ID NO: 70 - DNA, 4088 bp, Pseudomonas aeruginosa
aactcacccgctctgaacgagccccttgaaacacaagacaccgtttttcccttaccataagggataggcaaacgactgtgtttatgactaccagcagagacaaaaccatcgaagtgctcggccacccatttgcgcctctaggttgctacgagactgcagaggatccatgtagcagattacctcggccatgaagctgctaacggaagcgaagccatagaccgtaggcgatacacgtacgtatggctttccggaagggcgatcctagtcaactgtctgatgtccgccaaatctttctcaatactggtcattcaccttttccttgaccggctgtcaggcccaacgtgcattcagatcgtcgcctaaatttgttgcatcacgtagagtctgccgcgtgctcgcccctatgccagactagtctgatgtggcggatgagataggtcacgacggtggtggctcggtagagtcggcatcgccgagtcaacgatggaacgtaaggggcgtgaatgcaaatcagccgtaagctcaacctttatgagatcgaggatctctaccagtcgcttggtacggattccaatctcaggcttcctatcagcatgagccacggcggggggttgggcgtggatgcttcgctggcccagttcatcgtcacctgggcacgtgcttgcgaaaaaaccgtccttcacctatatgcccccgctggcgacgacgccatgacgcaaatcacgcagttggcgcagagtgcttctgggttcttcgcgctgatcatgtgcagtgaagtccacgctcagaatcatcaactgatcgatcggcgggaagcgcttctggcgatcaggccccttgtcgatgcgatgttcgcaggcgaccttcgtaacacctccaacatccgaggcgcccgtccaacggccatcaatctgttctgcgtgaacaacgcaaagcgtgagttcatcaagccgttttacttcgatcacgccgtgccgaaagtccagccgagatcttggttctcgactctcttggagacgtcatcgaagctgatgaatgctcgcagtggacaaggggcactgcttaggtcaggtctcccggcattgggcagcgtgctttgggagttgatctccaacgctgaccagcacgctgtcactgatgtaggcgggaacaagtacaagaaggcgctgcgtggcacctccatcaaactcaaccgaatgagtcgtcaggatgcgctgatgtattcagaccaagagccggagttggcgcgctttatcctgaagcatttcctgagagctgaggtactggacttcctggaagtctcggtcatcgacagcggtcctggactggcacggcggtggctgacggcgaaggaggggcggccagtagaaagcctggaggagctgagtcttgaggctgagcttgaggccacgctcgattgcttcaaaaagcacattacatccaagccgcagtctccgaactcgggtatggggctgcataacgctgttcaagcactcaacaagctcaaggcgttcgtacgcgttcggacgggtcggctttcactgcatcaggcttttcagggaagtgatgagattatggagttcgatccgtcgattcgatacggtggccgtgtgttggccgctgtggaaggcactgtcttcaccatctgcattccggtgagctgacatgttcgatctcatggattttgaagtcgagttgcgtcagtcaggtaagccggttcatgtggtggttttcttcactggccctgatctcctcacagacacgcaagcggctcacgctctacagcaccaattgtcgggttacgtcatgcctgacctagtggtgtttctgatgcctggttacaccttggatgaattccgagcacaccaggcaaatgctacatcgcccctgatggcggagctaagccgtaaaggcccaggctcgcctcgcacctacgcgagtgcgttctatgacgtgaatggtgccattaccgagtacgtcaatatctctggccctgaggagcagttcgaggaactcatcaagcacaactctaacgctatcgcgaggactggcctgacccacctcgtcgaacgctccaacgtgctgaagaaggcgcctgcaggcttcttctactcaaagccctcttctcgggcttcgaactatttcattcgggcggaagacctgctctctgagaccttgcatgcccactacctggcgtttgcatgcctatctctcatcagtaaggcaacggaagatgggatggggacgcccgataccctgtatctggacacaatcgcattgctgcctctggcgctgtccatgcaggtgtacctcatgcgatttgagcagccgggctttgcgaatatccggtcattccattcgcacgaaggcctaatcaagggtgggcctttgcccaaggcagtttccgccctgtgtctcatttccgcatcgacccagtgcggcctcgcgcagcaatgggtgaaggtaaacagtgctccgccgacgcgcgtggccaccattctttcatttgagcgctcatcggactcctgctccgtcttgcacacactgaagcagcccgaagactttgaaatgttgggggagggtgaagcgagcgggattcgtctaattcggatccatggcgagcggttcgttgctgagcacagtgaaaccaagctgctgaacatcggcactgatcatgcgccgcccctgctgcaatccaagttctactcgttcatgggggccaacctgttcagctgcttcacccatgaccggccaggactgaggcctcggacagtgcatgtcgataaagataacctggtggctgccagcgatttcggtgaatggttcgacagggtactgcttgaggaagctgtcgcgtcgacccgttggatcatccacgatgacgacgctgccagtgcggccctggccgatcgagcgatcgcttacttagggatgtgtggcgtcaaggtcggtaacaaggtctccttcgatgacttcgatgccaacacgaattttgacgggtctgtcatcgtcattgccgctgctgccgaacgtggctcacgcctgcagagtgtgagccgacgcctgcgtaccgctcagcaatcgggtaccaggctttacattacgggggcactcttcgggcgcagctatcaactgatgaaggatctgcagagcaacctgacgcaacctgccaaggatcacagccggtatgttttcaagacgtacatggagatcccggcagcggagcttgcctgcacgagtcattgggccgaagagcagcggctgctcatctccttgcattcatttgcggaaactttctcgccagcgattacgcagcgcatggaagtatttgatcgcgcctctactggggggcttggtctgaacccattttggccgagcagtcacaccgggcagccgatgacacttagccgaggctttgcgtttgtcgacggtacgaaggatgtgaggggcgcgacgtcaacggatatttacctaaccatcttgtggattctgcagaatgcccggtacagcggtaaggtgcagaacgccaagcggcttgagtccggtgagcttcagcaggtgctcctatcgccggatgtgttctcgcgcttcgacgatggcgttatccaggccgcattcttgcgcgcagcggtgccggcggagcttgactacagggctcatgaaacccacagcctggccatatcggacatcattcagcgcatcgccgcagggtacggacatgaacgtggtgaagccgccatggagtttgtcatggccttggctatcgggaagatacgactgcacaaggatgtcgataaccggctgcggagtaacttgatcaatatcttgacgccgcacgttcaggagatccgttatctgctggatccgaattacgaatcaccgttgtgatcaatttccgctaacccgttgcatgcgaggtatccagttaccggcaactcagctcatggctgagctgaaccctggttgctcttctagtttcgatggcttgccgattgccgggatcacccacctgcgtcggttctgcgacgaaggtctaagggcagggtggtggcacctggcttgctcattccgtttgacctcgccaccat

SEQ ID NO: 71 - DNA, 3637 bp, Klebsiella pneumoniae
cgctcagtccggttggtggttttggttggtttggcgattgctcagatcgcacaatccgggctgagttccctttcagtgatctactattccgcgcagctatttagtggatataatcacgctttgaaaaaaaaacgggtcaattactcttcgccccacagcaacgaataaggagaaatttgtgagtaacgtcaacactttccttaaggaaaatttatcttcagtaagtaagaatgtttttgtggctcctggcatccctgaaaaaaaactgaataatgtcgctaaagcatttaatgttgtggataacttgaatactgtgctagccatttatgacaatacggtatttggtagcgcaaaagatggcatcgtttttaccggtgaaaaactggtcataaaagaagcttttgaaagtccttatgacttgttctacagcaatattgaagcagtagaatatatagaagatgtcacggtaaatgataaaggcaaggagaagcgaacagagtctgtttccctcaaactaaaaaatggcgaggtaaaacgaatcaaaggcttgatggagtgcaactataagaagttgagcgacattcttaagcataccatcagtgactttgatgagttcaaagaagaagatcagctcatcactcttgccgaaatgtcagaagctctcaaagtggcttatgtcaaaatcattgtgaacatggcgttctcagatgatggtcaggttgataaaaaagaatttgccgaaattctcttgttgatgacccgacttgagttaacgactgaatcccggtttacactgcgtagttatgtcggttcagaatccagtctgataccggttgaagaattaattgcgatcattgaccgggaatgtgtcccaagccataacaaatcaataaaagtctctcttgttaaagacctgattagcattttcatgagtgttaatgaaggtgaatataaaaaattcccgtttcttcagcaagtgcaacctttgctgggcgtaactgacgaagaaatagaactcgcagtaatggctattcagcaagattttaagatgttacgggaagatttttccgatgatgcgctgaaacgcagtatgaaagaacttacggcaaaagcaggtgcggtaggcgtgccactcgctgctgtctatctctctggctctgtcatcggtatgtccgcagcgggcatcacttctgggcttgcaacacttggacttggtggcgtgctgggtttttcaagtatggcaacaggtatcggtgttgcggtgttattaggtgtaggtgcctataaagggattcgtcatcttacgggtgccaatgaactggataaaaccaagcgccgggaactcatgcttaatgaagtcatcaagcagacacaatccacattgtccgcgctaattaatgatctaaattatatttctggaaagtttaacgacgccctggatgcgcataatcggcaaggagaaaaaattctaaaactccagaagatgatgaatgcattgaccggtgcagcagatgaattgaataagaaatctaataaaatgcaaaacagtgcactcaaacttaagtgccctgtttatcttgatgaggccaaactcagttcgctgacccgagagcccatcaaaaaacaattccatgatgttgttctttcattctacgaagaatatcttgttgaagagcaaaacgatgggaagagtgttgaagtgaaaaaacttaagatcaaagaaaacgcttccactcagcaattagagaaacttgccgcgatctttgaaggcatcggctatttcagagcgggggatgttattaaaggcaaactaactgggctattctcataatgaaaaaaccagatactcaggtatcggccttgctggtgcagaagcaccagcttgaacaaagcgagcatcaattgggtgaccttgatgctgctctagaagcgcttaacgctttgcaaactgataccgaagcttctttagatgaaatgattttggctatggatggtgttctggaacactcaggtatcacgtttgatgaggatatccacacaacggtttctagtgaattcagcgattaccttgaatcctgtttgaccacgtcatcgtccagtatcagtaaactgtcgatgatagaaacaatagcgttcaccagcgatatggactgggaaacctattcccagtccatatcgcagtatgcccataaacacaatatcgatttaatagtcgatccgtttagcgccctgatgtctccaatccaaagaattgctctggaaaaacgtattcaggaagacttgaccttaaagactgcccgctgcgacaaatatgattacatgatcgctggcacctgtggcgttattggcggacttatcgatatttttctggtaggcgtacctggagcaggaaaactgacccagcttgcagataatgcagtggacggtgccgttgagaaattcgcttcagcctttggatggaagggcagttcagaagcaagcgattcgacaaaaagcgctatcggttttctggagagaaaattcaaaatcaattatgaccatcggcatggcggagatgttgacggtttgttcaggatgaacacgaagaatcaccatattaaaagtctcgcccactccccggacttagtcggtttatttttctcgatcctggatcaatttaccagtacggcacattttgtggcagacggaaaattggtttccgtagataccgagacttttgagcttaaagggaataacgttgtctctaaggtatttagtggtttcgtaaactggctgggccaccttttctctgatatggcaggttcttccggtgcagcagggagaggctccggtatccccattcctttcttttcattacttcagtttattaatgtgggtgaatttggccagcatcgccagtctttcgcaaccgtcgccgtccaggtttttgagaaagggtatgacttacggcatggattagcgatggcgatccccgtcatgattactgagttgcttgtgcgaatcacctggacggttaaacaacgttgctatcataagaaggactggggtgaatgtattccttcagcaaataaccctgaactcaggcgaatgttgcttgtggcgcatggaaccttgtgtctgatggatgtaggagatgcggcacttcgttcaggaggcgaaatgattcagttcctcctgagaacgaacctcatcggctggacgaggtttggaattctagcgattaaagaactccatgtctggtataaagcaggcggaattgatgccaatgctgtagatgaatatatggatcatgaacttcggcgaatgctaaaagcggggtagcgttacggctttgttgaataacattacgtttgggtgcttggctgtaaaaagctaggcaatggcgtatctgtcgacgcaatgcagaaaaggcaacttaattgcgaaacagaaatgttcggtgagttgcttgaccgtcctatggcagctaagtgccagaagtcgacgttgctaacatcagtatgtactcatcggcacagtccatgtcagagctattaactatagataaaaattcaataattaataaaataagaaccatctttctaggtggttcttattattaacaataaatattacgatttcaacgagggttagaatg

SEQ ID NO: 72 - DNA, 6037 bp, Escherichia coli
cctggtcctgccaattgctcccccagccatatgacataatccttttgaataatagggtttttatgcttgtactctagcccattcgcggtatcattttacgatctctcttccagttttatgcttaccgcctttgcctatcgtagaacaatgccgggaagcgttatcagcgattaagggcaaggaatgggcttctggatatttgttattatgctggcggttatctggcttctgttttccaaaaagaaaaaatcgccgccccccagagtaaacaacaaaatcatcaccaaaataaatcattcatctcgacagaaatctctcaataagccagataacagcatgacaaatatgcattctcaggcctccgatgatgacgaactggcaacctttacttttgtgaacgggcagacggttgaatacagcaccagccgccagccgtcacgagaaaacgccgcccgtagcaataccactccagcgcgatgggtcaaaccgggagaaagcatcaccattcaaaatgtcgtcattaatcacggttatttttatttcggcgggcggttaaaaacacattcatcaggagaatatggatatctttataacgatgactccgacgcttcgctggttaatgacgcttttcccatcgagcctggttcacggcattattatgatgagtcactgggatactggcccagctttgccacactctcccctcgctgccgtggcgcctatcttgactggctggcaagcgatcgcagcgatgcgagctgccccgttggctatgtttttatctatttttacggtctagaacgccgcgtactggccgatggcacacaagaagccatttctgacgatgaattcaaagcattattcgaagagatatcgcgcctgagaaccgtatttcaggcaagcggttccttccggcattatgcaacgcagttgctggaaatgatgatcgttctccgaccgaagttgctttctatatataccgaaaacgaatatttctcatcgaggagttcattactgttcagattaaatctagcgactgtggtcgataaaggacaacctatttgtgccgctctggcactggcatggatatactattttcctgattacaccctgcgcacgcctgcccgtcgatgtcatgctgaattttccgcattattcaaacagcgttatactcaaaaatacggtgacggtattgtcgtcaaacccaataaaacacggttgtatttaagctatacccccgccagtggtacgcttcgggaacttcaggtaaaaaaacagatggatcttcccgatcccagcgttttaaaagccccagttcagaaattaatttctgttgcagaatcctgtatcaacgcgctggatgcctacagtcgctatctcggtaaaaaagatgcctcaccaagtgatgtcgccgccatcatgctgcttcccgatgaaatactgaccgaagatgcagaacgtctatttgctgaatttaaacactgggcagatgagaaaatccgtgaacattcaggactggcgacagtggctgatttctgggccagactgggtatgcctgtaccggataagattaataagaaagaagccgagctgatgcaaaatttcgcccggcgagcaggctacggcattgcgccggatatgcgctatcaccttgtcagaccggatccagaaggtcatcttgttttatttcctgaagggcatgcggaattctacgtaccgtcggcggaatttacgtcagtctctgtggcgcttcggttgggtgccatgattgcacaaatggacaagcgcgtggatgttgctgaacaggccgcgctggagaaaacgattaatcataacgatgcgctgtcgccaacagaaaaacgttcgctgcacgcctacctcacctggcggctcaatacgcctgcaaatcaggctggtctgaaaggtaaaattgagcaactcagcgataaagataaatccactattggcaacgtgattatcagcgtcgcctgcgcagatggaaaaatcgatccggctgaaatcaaacaactggaaaaaatctacgccagcctcggtctggacagcagtgccgttaccagcgatatccaccgactgtcaaccgcagaaacaactccgacagctacgttacaaaccccatcagcgacgagcggcgcgttttctcttgatgaacggatccttgcccgtcatgaatccgacacaacggacgtacgccagttactgaacaccatcttcaccgaagatgaacccgcagacgaatccccagcggagatcccgccacacgctggcgcaggtcttgatgaagcacatcatcaactttaccaacgtttgcaggaaaaagaacgctgggcgcgaaacgaagtcgctgagctatgccagcagtttaatttgatgctaagcggcgcgattgaagcaattaatgactggtctttcgaacaggttgacgccccggtgcttgatgatgacgatgatatttacgttgacctggaaattgcacaagaactcaaaggataatttatgtctggcattcgtattcgtctcaaagaaagagacgctattattcagtcactgaagtcaggtgttacgcctaaaattggtattcagcacattcaggttggccgggtcaacgaaataaaagcgctgtatcaggatattgagcgtatcgctgatggcggcgcaggattccggctgattattggggaatatggctcaggtaagacattctttttaagcgttgtgcgctcaattgcgctagaaaaaaagctggtgacaatcagcgccgatttatccccggacaggcgcatccacgcgacgggtgggcaggcgcgtaacctctactccgagctaatgaaaaatctatccacccgaaataagccggatggaaacgcattattaagcgtggttgagcgctttatcacggaagccagaaaagaagcagaaagtacaaatgtgtcagttccgacgattattcaccaaaagctcgccgccctgtctgatatggttggcggttacgatttcgccaaagtcattgaatgttactggcagggccacgagcaggataatgagacattgaaatcaaatgccatccgctggctaagaggtgaatacaccacgaaaaccgacgcccgtaacgatctgggtgtgcgcaccattatttctgatgcctctttctacgattcgctaaagctgatgagcctgtttgtccgtcaggccggatacgcgggtctgctggtgaatctggatgagatggtcaatctgtataagctcagtaacactcaggcccgcgttgccaactatgaacagatactgcgtattctgaatgactgcctgcaagggacggctgaatatatcggttttttacttggcggtacgccagaattcctgttcgatccgcgcaaggggttgtacagctacgaagcgctccagtcccgactggcggaaaatagcttcgctcagcgggctggtgtcattgattattcgtccccttccctgcacttagccagcctgacgccggaagaactctatattctgttgaaaaaccttcgtcacgtttattccggcggcgatgcggataagtatctggttcctgatgatgctctgacggcatttttacgccactgtagcaacactattggcgatgcctatttccgtacgccacgaaacacgattaaagccttcctggatatgctggccgtgctggaacaaaacccatccattcagtggtcacagttaatcgccggtgtcgcgatcgcggaagaaaaacccagtgatatggatgaaataacatcggcagaagatgccgatgaggacggtctggccgacttcagattatgatgaacgaataccagcggctggatccacggatacagaagtggatataccggcagggatgggccgatctcagggaactgcaaaaaaaatccgtttcaccgatattagcgggcgatcgggatgttctgatcagcgccgcgactgccgcaggtaaaacagaagcgtttttcctgcccgcctgttctgccattgcggatattcagggcggctttggcattttatacatcagcccgcttaaggccctgattaacgatcagtatcgaaggctggaaaacctcggtgatgcgttggagatgccggtcacgccctggcatggtgatgttgcgcagagcaaaaagctgaaagcaaagaagaatcctgccggtattttgcttatcaccccggaatcgctggaagcgatgctgatccgcaatgcgggatggttaaagcaggctttcgcgccactggcatatatcgccattgatgaattccatgctttcatcggttctgagcggggtatgcagcttctctctctgttaaatcgagtcgatcacctgctgggaagaatcaacaatccagtcccccgagtcgcactcagcgcaacgctgggggaactggaacaggtgccgttatctctgcggccaaatcaacgtctgccctgtgacattattaccgacagtcagactcacgccacgctaaaagtacaggtgaaaggttatctggaaccgctgaccacctcgggccagcaatctccaccgtcggcagagacgcaaatctgccatgatatctttcgcctctgtcgtggtgattcccatctggtgttcgctaatagtcgcaaacggaccgaaagcattgccgccacgcttagcgatctcagtgaagcgagcatcgttcccaatgagttctttccccatcacggatctctgtccagagatctgcgtgaaacgctggaacagaggcttcaacaaggcaacttacccaccaccgccatctgtacgatgacgttagagcttggcatcgacatcggtaaagtcagctccgttgtgcaagttaccgccccccattccgtagccagcctgcgtcagcgaatgggacgctccggtcggcgcgactcgcctgccgtattgagaatgctgattgccgaacatgaactgacgccaacatcaggcattgtcgaccagctcaggcttcagcttgttcagtcgctggccatgatccgcttacttatcggcaacaaatggtttgagccagctgatacccggcagatgcactattccaccctgttccatcagatcctggcgatcgtggcgcagtggggaggcgtgcgtgcggatcagatctggtcacagctatgcctgcaagggccatttcagaaagtccggatctatgacttcaaaacgttattgaaacatatgggggagcaccagtttctgacccagctctcaagcggcgaactggttctgggcgtcgagggcgaacgtcaggtaaatcaatacaccttctacgccgtgttcagcacgccggaagagtttcgcattgtggcggggagcaaaacactgggctccattcccgttgattccccactgatgcctgatcaacacattattttcggcggtcgacgctggaaggtaaccgatatcgatagtgataaaaaagttatttatgtcgaggcgacaaagggtgggcagccgccgttatttggcggacaagggatgtccattcatgatgtcgtccgccaagaaatgctcactatttatcgggaaggcgactaccgcatcaccgttggcaatcgcaaggccgattttgccgataccacggccaaaaacctgtttgatgaagggctgcactgttttcgcaacaataatctggcttcggaatgttttattcagcagagacagcatgtctacattcttccctggctaggcgatcaaaccgtaaacacgttgtcggcattacttatccaacgcggtttcaaggcgggctcatttgctggtgtggttgaagtagaaaaaactacggtctcggaggttaaacaagcgttattcagcgcacttcaggaagggctaccttacgaatcccgtcttgccgaaagcatcgttgaaaagtgcctcgaaaaatatgatgagtatttacccgagacgttgctgacgcaggaatatggattacgtgcttttaatattgaacgcgtgacggagtggttgcaggggcatttatattaaggggaagaaga

SEQ ID NO: 73 - DNA, 9809 bp, Escherichia coli
cgtgattcagttcgccagactgcagcgttttccatgaatataactccatctggtttagaaagagttccaatctaacgatattgggaccagaatcacaggcggcagtggctttacgcttacaataactattctatcctgacaattttaagcctcgtttgttacgatgtaaccctataactatgtggttcctcaaccttttttgcccaaaaaatgcccaatgaagtccaaagtggaaaacagatggttatccgttgatgagattgcagattacctcgcgattaagcgagacacggtatacaagtagatcgcaaagaaaggtatacctgcacacatgattggacgcctttggaaatttaaaaaggatgaagtagatggctggatacgcgatggcaaagctggcgaaaacagtaatcaagaataaaaaagcaaatttaggagcagtttaatgaaaaccgtacgtagtgcatgccagttgcaaccgaaggccttggaaatcaatgtcggcgaccagattgaacagcttgatcaaatcatcaacgacaccaatggccaagagtactttaaaaagaccttcatcactgacggttttaaaactttgctctccaagggtatggcacgcttagccggtaaatcaaacgatactgttttccacctgaagcaagctatgggtggtggtaaaacccacttgatggtcggctttggtttattagcaaaagatgctgcccttcgaaatagccacttaggatcaatgccataccaatcagattttggctcagccaaaatagcagcattcaatggacgcaataatcctcattcctatttctggggtgagatcgctcggcagctaggtcgagagggtgtattcagggagtactgggaatccggagccaaagctcccgatgaacaagcatggataaatatttttgatggtgaggaacccatcctaatcttgttggatgaaatgccaccatacttccactactacagcacccaagtccttgggcaaggaactatagctgatgtagtgacacgggctttttccaatatgttgaccgcagcgcagaagaaaaagaatgtatgtattgtagtttccgatcttgaggcagcttacgatacaggaggcaaactgattcagcgtgcattggatgatgctacgcaagaactcggacgcgccgaggtatccattacgccggtaaacctcgaatccaatgaaatctacgagattctgcgtaaacgtttgtttttgtctctgccagacaaaaatgaggtctctgaaattgcgtcgatctatgcatcaagacttgcggaagccgctaaagccaaaaccgtagagcgcagtgcagaagcattggcaaatgacatcgaatctacttacccattccacccaagctttaaaagcatcgttgctttgttcaaagaaaacgaaaagttcaaacaaacccgtggtttgatggagttggtttctagactgcttaaatcggtgtgggaaagcgatgaagaggtgtatttgatcggtgcccaacactttgatctttcgatacacgatgttcgtgagaagctggctgaaatttcagaaatgcgcgatgttatcgcaagagatctttgggactccaccgacagcgctcatgctcagatcattgacctcaataacggcaaccactatgcacaacaggttggtacgctattgctaacagccagcctctccaccgcagtgaactcagttaagggcttaaccgagagcgaaatgctggaatgtttgattgatcctaaccatcagggtagtgactaccgaaacgcattcactgaacttgctaaatcagcttggtatttgcatcaaacacaagaagggcgcaattacttcagtcaccaagaaaatctcaccaaaaagcttcagggatatgccgacaaagcacctcaaaataaggttgatgaattaattcgtcaccgactagaggaaatgtatagaccagtcacgaaagaagcatacgaaaaagtactaccactccctgaaatggatgaagcacaggccacactgaggagtggtcgtgccctgttaataatcagcccagatggcaaaacaccacctggtgtagtcggcaacttctttaagggcttggtaaacaaaaacaacattctggtattaacgggcgataaatcctctattgccagtatagaaaaggctgcacgccatgtttatgctgttaccaaggcagacaacgaaattacagcatcacatccgcagcgcaaagagttggatgagaagaaagcacagtatgagcaggacttccaaactacagtgctctctgtattcgataagctcctgttccccggtaacaatcgaggtgaagacgttttacggcctaaagcgctggatagcacctatccatccaacgaaccatacaacggtgaacgccaagtcgtgaagactctcacgtccgaccccatcaagctttacacccagattaacgaaaatttcgacgcactgagagcccgagcagagtcattgctgttcggtactttggatgaggcaagaaagacagatttgctcgataagatgaagcaaaaaacacagatgccttggttgccaagccgtggcttcgatcaactcgctatcgaggcataccagcgaggtgtatgggaggatttaggcaatggctatattacgaaaaagcccaagccaaaaaccactgaggtaatcatcagcgaggactcatcaccggatgatgccggcaccgttcgtcttaaaatcggcgtggctaatgcaggtaacagcccacgcattcattatgctgaagatgacgaagttaccgaaagcagcccagtacttagtgataacacgctagcaaccaaagcattgcgagtgcagtttttggcagtagaccctaccggtaaaaaccttactggaaacccaaccacctggaaaaatcgactgacattacgcaatcgctttgacgaagtggcgagaacagtcgaattgttcgttgccccccgtggcacaatcaagtacaccctagatggttcagaagcacgtaatggtgaaacctacaccgtgccaatccagctcgctgatcaggaagccactatctatgtctttgctgaatgtgatggcttagaagagaagcgaaatttcacctttgcggcagcaggttctaaagaaataccgatcataaaagataagcccgccactctggtcagcccctcacccaaacgtatggatagctcggcaaaaacctacgagggtttgaaaatcgccaaagagaaaggcattgagttcgagcagattagcttaatggttggatctgcaccaaaggtgattcatatatcgctaggtgagatgaaaatcagcgccgaattcattgaaaccgtattaacgcacttgcaaaccgtgttaagtccagaagcccctgtggtcatgaccttcaaaaaagcctacacacagactgggcatgatcttgagcaatttgttaagcagcttggcattgaaatcggtaatggcgaggtggaacaacgatgaataaaaccgttgattttggggcaccgtcagaattcggtatgcatcacttctatgtggagattcccgcagcgccccgtgacgctgttgtgatctatgaagactatggctttgacggtgaagattctcgccgagaaacagtagagtgtcgcctgatattagccagagagctctggactaagatccgcgatgacgttcgccgtgactttaacgctcgcctaaagattaagaaacaaagctccggtacttggtctaccggtaaagtgaagcttgaccgctttcttggacgtgagttgtgcgttcttggctgggcagcagaacatgcctcacccgatgaatgtctggttatttgccaaaagtggctggctttacgcccagaagaaagatggtggctttacagtaaaaccgcagctgaagcaggtcgtgatgatcaaacacaacgaggctggcgtaaagcgctctattgcgcgctatcggatggagccaatatcaaattggaaaccaaaaagaagcccaagtctaaaaagctacaagttgaagatgagacccaggatctgtttgggtttatggaaaagggagagttttgatggccttgcaaccgtttgaatggagagacaaaccgtctcttattgagcacctgttcccggtacaaaaaatatctgccgagacctttaaagaacgaatggcaagccacggtcagttgctggtgtcgttgggtgctttttggaaaggcagaaaacctctcatcttaaacaaagcgtgcattctgggctcattgttaccagcaactgacaacccgcttgaagatttagaggtatttgagctgttaatgggcatcgactctgagtcaatgcaaaagagaattgaggcttcactaccagcatcaaaacaagaaacaatcggcgattacttggtattaccctatgccgaacaaatcaggattgctaagcgcccggaagaaattgatgaatctcttttcgtccatatttggaatcgggtcaacaatcatcttggtacttctgctcacacttttgcgcaactagttgaggaactaggtgttgcacggtttggccataggccaagagtggcagatgtattttctggttcgggtcaaattccgtttgaggctgctcgcttaggttgcgatgtctatgcctctgacttaaacccgatctcctgcatgcttacttggggcgctttgaacgttgttggtgcgagcgcgcaaaaaagagtagaaatagacaaagcccaacgggatatcgttaagaaagttcaaaaagagattgatgagcttgacattgagtccgatggccgaggatggcgagcaaaggtattcctatactgcgttgaggtgacctgccctgaatccggttggcgtgtgcctttaattccaagtttgattatcagcaatagttttcgagttgttgctgagcttaagcccgttcctgctgagaggcgatatgatattagtatccgtgaagtatcgactgatgaggaactggagttctataaatcaggcaccatacaagatggcgaggtaattcactcgccagatggaaaaactcagtatcgcgttaatatcaaaacaattcgcggtgactataaagaaggcaaggagaacctaaacaagctgcgaatgtgggagaaaacagactttgctcctcgtcctgacgatatttttcaggatagattattttgcgttcaatggatgaaaaaaaaacctaaaggatcgcagtattactacgaatttcgtactgtaaccaatgacgacttaaaacgcgaaaaaaaggtaatagaacatgtcgcatccaaattagatgactggcagaagcaaggtcttgttcctgatatggttattgaagcgggcgataaaacggatgagccaatcaggacgcgaggctggactcattggcaccatttattccatccaaggcagttgctatttttgagcttggtgaacaaatattcactcgcagaaggaaaatttaacttcttgcagtgcatgaatcacttgtccaagctaactcgctggcgaccccaggccggtggtggtggcggttctgcggctacatttgataatcaggcgctcaatactctgtacaactacccagttagagcaacaggatctatcgaaaatatcttggctgctcagcacaaccactgtggaatcagcgagaatgtttcctttgtggttaattcacatccagcgccagagttagatgtggaaaacgacatttatattactgatcccccatatggcgatgctgtcaagtatgaagaaatcacagagttctttattgcctggctgaggaaaaatccgccgaaggaatttgcccactggacttgggatagtcgccgatctcttgcggtaaaaggagaagatgagggtttccgtacaggcatggttgctgcttatcgcaagatggcgcagaagatgccagacaatggtttacaggtgctaatgtttacccatcaaagtggcgctatctgggcagacatggctaatatcatttgggcgagcggccttcaagttactgccgcatggtacgtagttactgaaactgactctgcattacgtggtggttctaacgtaaaaggcaccatcatcctcattttacgcaagcgccatcaggcattagagaccttccgcgatgatttaggttgggaaatcgaagaagccgttaaagagcaagtcgaatcgttaatcggattggataagaaggttcgttcccaaggcgcggaaggcctctacaccgacgctgacctgcaaatggctggttacgcagccgcgttgaaagtactgacagcttattcccgtatcgacggtaaagacatggtgactgaagccgaggcaccacgccaaaaaggcaaaaaaacttttgttgatgagttaattgatttcgccgtgcaaacggcagttcagtttttggtgccggttggcttcgagaaaagcgaatggcagaagcttcaagcggttgaacgcttctatctgaaaatggccgaaatggaacaccagggtgcaaaaaccttggataactatcagaacttcgccaaggcgttcaaggttcaccattttgatcaattgatgagtgatgcctcaaaggctaactctgctcggctaaagctttctaccgagttcagaagtaccatgatgtcaggtgatgccgaaatgactggcactcctctgcgagcccttctttatgccttatttgagatatcgaaagaagttgaagtagacgatgttcttttgcatctcatggaaaactgcccgaattacctgcccaataagcaactgcttgccaaaatggcggattacctggctgaaaagcgtgaaggtctaaaaggtaccaaaacgttcaaccctgagcaggaagcaagcagcgcgcgtgtccttgcggaagccattcgaaaccagaggttgtaatctatggcgattaagcgcttttcatcccgcacagaaagattagatacggaattcctcgctgaatcgttgaaaggggctgctaagtatttccggattgcgggttatttcaggagctccatctttgagcttgtaggcgaagagattgcaaagattccagaagttaagatcatctgtaattccgagcttgatctggctgacttccaggtagctactggccggaatacagcactcaaagagcgctggaatgaagtggatgtagaagctgaagcgctactgaaaaaggagcgctaccagattttggatcagctattacattcgggtaatgttgagattcgcgtagtccctagggagcggttattccttcacggcaaagcaggctcaattcattatgcagatggcagccgtaaatcttttattggctcagtgaatgaatctaaaagcgcattcgctcacaattatgagcttgtttggcaagacgatgatgaagaaagtgcggactgggtagaaagagaattttgggcactctggactgaaggcgtcccgctgcctgatgcgatcttagctgaaatccaccgtgtatctaatcgccgggaagtaaccgttgatgtattgaaaccagaggaagtcccagcggcggccatggcagaagcacctatctaccgtggaggggagcagttacagccctggcaacgctcgtttgtgactatgtttctggaacatagggagatctatggcaaggctcgcctactattggctgacgaggtgggtgttggtaaaacgctatcaatggcaaccagtgcattagtcagtgctttactagacgatggacctgttttgattctggcaccttctacactcacgattcagtggcaaattgagatgatggacaagctcggtgtgcctgctgcggtttggtcctcgcagaagaaagtttggctgggtgtagaggggcaaatactctcacctcgaggtgatgcctcctctatcaaaaaatgcccttatcgaattgccattatctctaccggactgattatgcatcagcgggagaagactgactttgttaaagaagctggaatgcttctgaagaatcgtttcggtaccgttattctggatgaggcgcataaagcccgtattcgtggaggattaggagatcaagcttcagaacctaataatctcatggccttcatgctgcagatcggcaggcgtacacggcatctggtactgggtactgcgacacctattcaaaccaacgtacgtgagttatgggatttattgggtattttgaactctggtgctgaatttgtactaggcgatgctctgtcgccatggcatgaccatgaacaagcgattccgttgataaccggccagactcaggtgacatctgaggctgaagtttggcattggttaagcaaccccctgccgccaagcaatgagcaccatactgttcagcaaattcgtgactacctgtccattgataataagtcctttggatattctcatcgtttcgaagatctcgactatatgattcagagtctttggctctccgaatgcatgacacctagcttctttaaagagaacaaccctatcctacgccatacagtgctgcgtaagcgtaaacagctggaagatgacggtctgttagagcgtgttggggtgaatacacatcccattaagcgcaacctagctcagtatcagtcgcggtttgtggggcttggcattccgaccaatacaccattccaggtcgcttacgaaaaagcggaagagttcagtaagttgcttcagtcacgcactcgagccgcaggcttcatgaaatctttgatgttgcaacggatctgctcaagtttcgcatcaggcttaaaaactgctcaaaagatgttgaaacatacggtttctgacgaagacgaggatctagttgaagatgttgagcacttactttcagaaatgactcctgcggaggtcgcttgtttaagagagattgaaacacaactgtcacgccccgaagccgttgactcaaaactgaacacagtgaaatggttcttaacggaattccgtaccgatggaaaaacttggctggaacacggctgtattattttcagccagtattacgacacggcggagtggatagcgaaagaactggccaagtccttaaaaggcgaagtggtagccgtttatgctggcgttggtaaaagcggcttattcaggggcgaacagtttaataacgttgaacgcgaattgattaaatccgcagtgaagacgcgcgagattctattagtggttgctacggatgccgcctgtgaaggcttaaacctgcaaaccttgggaacactcatcaatgtcgaccttccctggaacccatctcgtttagagcagcgcctcgggcgaatcaaacgttttggtcagacacgtaagtttgtggatatgctcaatcttgtgtacagcgaaacacaagacgagaaagtttataacgtgctgtcggaacgcttacgcgatacatacgacattttcggcagccttcccgatacgattgatgatgaatggatcgacaacgaggaagaactcaacactcgcatggatgaatacatgcatgaacgaaagaaagctcaagatgcgttctccgttaagtatcgcggtactctcgatcctgatgctcatctctgggaacgttgcgctacagtactgtcacgtagggacattgtaagtaagctcagcgaaccatggggaagctaattatgttgtgatgtggatgccccgctcagccaaggtcctgcacaactatgttggatgctcttttttagagggctacatcatgaattcgatcaaagttattggtacaattctgagtaaatctgtctctcagggtatccatttcgagtg

SEQ ID NO: 74 - DNA, 11425 bp, Yoonia sediminilitoris
gccagtcgcttgcaaagtattgagaattgatgtttatttgtgttttgaggtggtctttgaaaccaattttcgttgtcaggtcgagtattgggtgcagcagacgctattcaaacattccgtcccggttatccgaaggtttccggctcggtagaaggcctgaagcatgtctctggttttgaagacggttcgggcttttccgagaggtcggactaccgaagaattgcttgttctcgtcggtgcggctttctcaaatgacaagcggcttgcggctctcagcgaactggagacgctatttcgcgatggtttgatagtgaaaggcaaggacggtcgctggcgtgcaaaggcagatggtttcaaacccagacatgagagcgtgtcggcttcgagaggtggagggcctgagggcttcgttgatgtcattcacgctgccaatgcattcttctcctcggaaccgacggcggccgaactacctgatcaagaagacgaaagttcagatgctcccgatccgcaagcgctactgagatattggcgctcggccttgcgtgccgatccacgaggagccacgacccaggttctcgacaaacatggaatcgagtgggccttgatctctgggcgtggccctatcggtccagaagaagggcaaacgctgactgtttcaatcgaactcgacgcgattgatcctgcctttcgagaggctctggtgcgaagggaaggtcacgagaacgcgcttgcagtgggttggccgatggcggtcggacgacgtggcggagttcctgtctttcgacccgttggcatgttagcagcagcttgggatcgtaaggatgaccgtctaatcctgacgattgatgccgatgacgttttggtaaaccctgattgggtcaaaagtgccgctcgtgccagcggctggaagcgcgacgacctcgctgacctttttttcgtggacgatgggctggggctgcgggctcaggattttgtggagaaggtaaggattgccgttgccagtcagatacgtggtcgcgttgtcggcgagaatctcgccacacagctcgatgcctcggctcaagggatttttgacagcgccgcgatcttcctaccgactgactcttctttcaccgcgggggctgctcgtgacctggatgccattgcgacatggccgaaggaccgccttgagagaactgcgcttggcgcggtattcgggtttgaccttcaagacggcacggacaaggctgctgcaatcgacgcagttccgctgaacaaggaacagttgcgcgcggttcgatccgcatgccaagcgcctttgaccgtcgtgaccggtccgcccgggactggcaaaagccaagcgatcgtatctatggccgcgtcagtgctcgcagatggtggcagtgttctcgtcgcctccaagaaccatcaagcgcttgatgctgtggaggaccgtcttggctctcttgctccggacgtcccattcgccatccggacactgaacccgaatgacgaggcggatacgggcttcaaggacgccctcaaacaactcatcgacagcgaaaatgtgacgcgcaacgcatctgtcgacgaattcgcattaggcgagctcaaaagcgacgcgatcgcgagaagcgaagtggttagcgtgatcgataagatcacggaaacggaatgcgaaatttccgatattctggaccggattcaagtccgagaggatcgcgggcgccctgacaaccaagactctgaagacgtggatccgagacaaagtctcttactccgctttgtctcttggtttggatcgcttttcgccaagcgtccccccaaagtagcgccagtgacagatcattcttcgtcccgccgcggaatgaacgtcaaagagcttcattgcgcgctggcagaaaaaagatatgaacgcgatgcgctcgggacacctgacgatccgatcgccttaggcgagaagatccgggaagcgaccgagaatcttctgcctcgcattctgtccgcccggacacatctcccagaggatgagaggcgcgaaatcgcagaactctacgatgactggacattcgacgggggacggggacatccccctactgatctttcgcgcgtcctcatttcgcatcggcctttgtggcttgcatcgatcttgggcacgcctcgacgcatacctcttgatgacgggctgtttgacctcgtgatcttcgacgaggcgagccaatgcgacatcgcgacggccgttccgttgctggcgcgcgcgaagcgggccgtcgttgttggggatgatcgacaactgtcattcatccctcaactgggtcaggcgcaggatcgcaatctcatgcaggctcagggcctaccggtcgccagaatgggccgtttcgcccagagtcgccgttcgctattcgatttcgcatcgcgcgtgtctgttgccgacaacaggattactctgaggcaccagtatcgttcagcaggccccatcgtcgattacatcagcgagaacttctacggaaaccagttgcagacctcgtatgacccgaggcgactgaacgtgccagatggggtgcgccctggcctcgcatgggaacatgttcctgctcccgcggtcccgcaaatgggcaacgtcaatccgtcggaagtaagcgcgattgttaggcacctgaaaaagctgatcgttgaagacaaatacactggcagcatcggtgtcataacgccgtttcgcgctcaagtggccgctatcgagaacgcggtcgatgccgtcctggatgaaccgaagcgcattgcctgcgagctcaaggttggcacagttgacggttttcagggacaggagcgggatctcatcatgttctcgccttgcgtcggtccacgcagcccgcagtctggcttgaccttctttcagcgagatacgcgccgtttgaacgttgcgatttcgcgggctcgggcggtcgcgatgatcttcggcgatcttgattttgcacgttcagggcaatcaaaagcgctggccaagctcgcttcgagggcgacggaagcgcggacgaaacggggcgaaggtgtgttcgacagcgattgggaacgcaaagtctatcacgctctgaaggcccgaggtctggatccgcagccgcagcacgaaatagctgggcggaggctggacttcgcgttgtttggagcgaatgatgtaaagctcgatctcgaggtcgacggacgcagatggcacgaaagcccagacggtcgtcgaaagacgtcagacctgtggcgcgatcatcaactgaagtccatgggatggcgggtgcgccggttctgggtggacgaactttcaagggatatggagggttgtcttgaccgagtcgaacaagacctatcgtaagtcgagcaggaacaccgcggttgcgttggggctgggtggcgccgccatccttgcctcgggctttctcgtcctgcaagtcaactcgctcgatcgccgatatggtcgtatcgaggaaaatctgagctactacaccggggaactccaatccgcgcagcagcaactggcttttgctcgtgagcagtttcgcgaactttctgaccaaaagcaaagcttgtctcaggaagtcgcgagcgccgaacgcagccttcaaagcgcggctcagagagaggcggatgcgcaggctagtgtcgaagcaagccaggccaaattgactgctgagcgggaccgtttggccgaagcccaaaaaacgattgcggatgcgcagcgaattgaacgtgaaactgctcaagctttgctgcgaagaaatggcctcgaaacagaggtggtcaaactgaaaggcgatgtgcaggcccttaaggagagccagcaagagttgtctgctggtgttgaccaaacgcaatcggctgtcgatcgcctcgaagagagaagagctgaacttcaacgtgaagtggatagactcgcgcccgccgttgaagaccttcgtgcacaggagcggcttgtcgaacaactgcgaggtgacgaggatcgtctcgaacagagcctcgacgatttgaatgcgaacattgcaattgcacggactgaattggcgaccagcgcggaaaaggtcgatgcggccgaggagaggctgcgtgcagggcaggaacaaatagcatccacagaagctcaacttgaaacactgaatttcgaagtcgatgacctcgagtcgagacagggcgaactgcaggcaagtgtctcgggagcagagacgcgtctttcttcattgcaaaatgaactggagatcgcacagaacgcggtgacgcgagctgatgcgcagcgcgctgaaactacagaagcactcaacatcgctcaggaacagttttcgacgcgaagcgctcagctctctaccctccagtcgcagattgcatcggcagaggaagagcttgccgaacttgaagagagacgggcggaattcagcagattgcaggctcaaatggaccagctgcaagcacgtcgaacgacactagaggaggttctccccgatcttgagaagcgagttcaagcagagcgggctaatttgggttctatcacgacagaagtggagacagagctcgggcgagttgctgtactcaaaggccagggttccagtctggaggccgacatcgagcgcctccaagagcgtcgcgacgaactcgggctggaaacgcagtccgccactgctgaggcggaggccgcgcgcgcatcccttcaagctgagcttggtcaacttgcggaaaccgatgccctttcaagagcgcggactgccgatttgaggcgcttgagagaagctcttggagctgctgaaagagagctttccgaacttgaagagagacgggcggaattcagcagattgcaggctcaaatagaccagctgcaagcacgtcgaacgacactagaggaggttctccccgaacttgagaagcgagttcaagcagagcgggctaatttgggttctatcacgacagaagtggaaacagagctcgggcgagttgctgaactcaaaggccagggttccagtctggaagccgacatcgagcgcctccaagagcgtcgcgacgaactcgggctggaaacgcagtccgccactgctgaggcggaggccgcgcgcgcatcccttcaagctgagcttggtcaacttgcggaaaccgatgccctttcaagagcgcggactgccgatttgaggcgcttgagagaagctcttgctgctgccgatgatgagctttccgagacacgagcggaactgatggacggacagtctgtggaacaggaaccagtatcaaccattagtgaaggcgctggcgcccgtgaaaacgctcagtctgacaactccgcgccatcgagcaccgacaattgaggtaaccgaaaatgcttacggacaatacaatacttgtgctggcgattgcgggtgtcctgatactgctcgccgtggttcaactttttctggccgcccgccacgaccgggcggttacggcagcaggcccgatcgaagagcttgccgtctacgagaagcggctggaagaaaaacagcggctcatggacgatcttgaagctgaagtggaaaaacgtcgggaggcaatggccgtcgttactgacctccgggctgaggtcgacggtctacggcgtcagaaggaggagctccttacagaatgggagagtctccgtgaacgtcgcgacgaagttgcggcagttcgcaaggagactgaggacgccgttgtcgaacgccagcaactcgaaacggagatcgccccgcttcgtgcggagtatctggagataaaggaaaggctggaaaaggcggaggagctcattgagcgcactgacgccttgagacgagagcacgacgaaatctccacacaggtcaaagatcttcgggacaagaagaggcaacttgaagaggccgaggaacgggtttctcgcctggaagagcgttccttcgaacttgagacatcgaatgctcggcttgagggacagaagtcttcgcatgaaagcgagttgtccgccttggaagcgcggatcgcctcggaacacggtgggttggcatctgcccaaaccgaacatgctcgcctcgatgcagaggttgcggctctgaaccaggaaacccgccgctccaggggcgaaatcgagacgctccaggacactcgaagcgcgcttgatgctcgattggcacacctcaaggccgagatagctcgccgagaaggtcgaaccgtcgacggggaaaccggcgaaacggatccgcttcgcgagctcaatgaaacaccaccggtcattacggagatgaggacctgggacaacgcgccccgcgagaacgaggcggatgccatcaaacgcgtcgaacgccgcctacgcgcaaagggtctcgactacccggctcgcacgcttcgcgcttttcacaccgccatgaaagtaaatgaaacaacgcagatggcggtccttgccggtatttccggaacgggcaagagccagctcccgcgtcaatacgcggccggtatgggcatcggtttcttgcaagttccggtgcagccacgttgggatagtcctcaggatctgatgggattttacaactacatcgaaggcaagttccgacccacagacatggcgcgtgcgctttgggcggtcgacgggcttaacaacgacgatgcggaacaggatcgcatgatgatgatcctgctggacgagatgaacctcgcaagggtcgaatactatttctcggacttcctcagcaggctggaaagccgtccgcgtcccgatgacgtcgacaatgaaaacgaacgcaaggacgctgtgatcgagcttgaaatcccgaacatggaacgcccccccaggatttttccgggctacaacctcttgtttgcgggcactatgaacgaggacgaaagcacgcagtcgctatccgataaagttgtcgaccgtgcgaatatccttcgtttttccgccccgaagaaaatcaaggacggacaggcagaaggaacggtcgagccgattttggccctttcgcaacagacatgggagagctgggggcggtcgagtgcgtctgtcgatggcggtcggcgtgtcaccaaccggattgaacaaatggttgatctgatgcgtgacttcaaacggcctttcggtcatcggctcggacgcgcgatcatggcttacgcggcgaactatcctgaggttgaaggcggccgcggtgtcgacgacgctctcgcggatcaattagagatgcgccttctaccgaaactcaggggcgtggaaaccgacatggctggccctcagttctcgaggttgatgacctttgtggaacgcgagctgggggacgacgccttggcccaagcaatcggtgagtcaatgtccctcgccgaggcaaccgggcagttcgtatggagtggagtcacgcgttgatgcggtttctggcccgtccctgggcggcgaaagcccttggagaggacgaagcctttgggcccgaagactgtctgatcggtagctaccagggggcgaacccaggcggctacgaatacgtgacgctcttgaggggaaacgtccgaggtagcgataccggaactgttctgtttccctatccaaagcgtgaggaagctgtcgggcccgcgcgtaagggcttcccggtgcgcccaaggtcggggcacgatcctgccactccggacgaagaagaaggcgcagaggcccttcgacacatgaacgaagttcttgcacgtatccaagaactggaaggtgcgattgaagacccaagcgatacatgggggcgcctgagggatgcttggaagcgcgccgaaaatgaagccgaacccaaaatggctgaaatcgtccggcaggcgcggggcatgcttccggtgcttcgcgatctggaaaaacgcatccgccgggttctacgtaggcacagggagctaactccccttgatcgggtgcaggagatggatcggacctctatggtgtggctcagccgacagccagggcgaagcatcgcggaacgtgcaggttcttcgcaacgaattcttgcgacggttcgccgtgagaatttcgatacgctcgagaaccgtgtcctgcatgcctacacgcgtcttgccgcagatgttgcacgcgaatggacccgtgagcaccctcgtgcgaaggacagtgttcgctacaaacaggttgaggcttttaggaaggcctgtcgagtattgtcgcgaacactcagtgacctcggtgtcatgatcgcgtcggccggcgtccagccaaactatgtgctcatgcaagatcgcagctatcgagaggttcatgagggatggctgaggcttctcttacgccgaaaaattgtagatgatctttgggcttggcaggccgaaacttggacggatttctccgttctttcgatcattcttgccatcgacgaattggaagaggctgaacttgtcgctcagtcgccgatttcgtggagcggtgaggcaacaggcggacgctggttcaatcaggatcggccaatcgccgtcttttggctgcgcgacaccaaccgcattgttgaagtccaagcacgccctgagcgaccaggaaccatgttgagcgcggcacaagcgcacgtcgccctcagaatttccgatcccaaacgggctgaccttccgcgcaggatcgctgtctggacgccacatgccatgcgtagaattgatctcgaggatactgtgcggggggcagttcaactgcttcaccaaatccagcccctcgctcagacggaagttttgcggaatgggttgatcatgaccccagcacgtggtgtcgcagctgaagagagcgcaactcacggaagagcgatcgttacggcaatcgccataggcccagccggtgaagacctagcgaagggattccaggccgtgcgcgacttcattcgcagtgagctatacgaggtcgcaacatgatcgaccgaaaactatgcggcttcgatctcaacggatggagagatttcgttgcgaagaactggcgctccgtgccaggtgaagacgaggtcattggtccgaccgatatcgtcacaagtggccctctttcgtcgatcgtgcggatcggggaaagccgcctcgcaggttggatcggaggaccgcaggctgacattgctccgcacggtcgcggtggtggttggggtgatgtcgggtcagaacaaagacgcattcccgttcggtcactgctggaaatgcgtgatgacggggtcgaaaaactcgcccaggcacttgtgggatctgcgagcggttcggcaaacacagtcgtttcgatcgatgagggcccggatggcgatgaagccgtccaagagcaccttctcgaagcacttgcccgagggaagttccgaaatggctcattggtttggcgaccagttcttgccgccttgttcgccattcatcgcgatcaggtttcggaggggcagcttgtaggcgtcgtctcccatcagcgccaaggcttgtcagttcaaaagctgcgtattcgtagcgcaaggaatgtgctcgccccggagcgacgcgaggccgctgcccatataccgtgcgacgctggttacgagtccctattccgaggtgcccgcaacgccgctgtcggggcagagggtttttcggcgcgcacagctcatcgtgcgatcgcaagctcggtcggaaaagctggtttagggatggattgcaatcctgagatgctccgcatgcccaacggcgattgggagctcttggaccttaataaatttgacgcgtcggaagtggtgagtgtcccgagttccgagctcgatctggccgattgcgacgtcgttcttttcgagaccctttgtgaaggtcggctcaaaaaatgcctgagtgatgctatccaaagagcagctccagtcgaggtgctctctcttcccgcaacggctgttgcggaaggtgccttggaagcagcacgccgagccggggacggggaaccgatcttcttcgactttctaccacgattgtccaccatcgtgttcggatcggatggcgcaaagaatttcgatctcatacggaaagaagaaacgctcgaagcaggccggacctacagaagccctgaagcagcatctctcgcgataccggcagggcaggagagcgtctctgtctacctgaggaaagaggaagctccctggcctcgaaaggcaagggtgtcgcttggagctcctctgaagcatcaagctgccgtctcgctgtgggtcgaacagaaaccggccgccgggcgagcgcggatcctcatggaatcgccggacttggggcggaatttcgcggtggattgggatgaagcactggaagaggaacggccctggtctgagatcatcgagagcttggatacgcaagtgtcaattcccaaacgtctggttcttccctgcggcatggaggcatggcatgacagcgatcgatccgcaggtatgctaactttgctcgaatccgagcctaatcgcagccgcacggattgggcgacccttcggcaaaaactttcacagcgtccctttggcaaatactgcatctcaagtgacggcgacgtgcctccggagatcgcggcagaaaccctcgagcggtttgaaattctgaccagcaaagcgcttgaggttactgaaaagcgcctgaggggcgaaagcggctacggaacggaagacaatgaggctctcaaattcttgagttggcagttccgccgatgcccgcgcgatgtcgcgacgtggctgatggactgtattgaagcgtccgggcgcaaccatccgttcgtcaaacatcaagcaagttgggttctcgtatatcagggccttggccgcatcgtcggaaacgaagaggacgaagcgagagcaatgcggttgcttctgacttcgtccattgaggactgggtctggaaccgacaaagcgcggccatggcgttcatgctgtctcgttctgacagcgctccatcttacctggaacgagaagacgtagagaagctgaccaagaggactatcgcggacttccaacgtaatatcggcggccaatatacaatgtttaactacgcgcctttcttacttgcaggcctgataagatggcgtctcgttgatcctaaagctttggtgatcggggccgacccgttggcggatgacctcttggctatcattgagaaaacagagcacgacctgaaggcccgttgtgggtccaatatgaatttccaaaggcggcggtcgaagttcttgcctatcctccaagacctgaagtcagagctggcgggagaaggttcgaatcctgacctgttgttggatatctatggagcgagcggaacgtgaccatgagcgcgcaggtaccaagctgctggatcaagcctctgggacgagcagaagcccgtccgttgtataaaatcaccacagacacaagcaagagatatcgtgatactaaagcgctctggaggattcccatcagacctgatgaacatcgcaactgcatcgaaccagaaccatcttggcaactaggtgcggaccaaggactgaagcatgtgcctatcgctcaa

SEQ ID NO: 75 - DNA, 4100 bp, Salmonella enterica
gggctgtttggttgaattaaaaatacgaactaaaaccaacaagagtcggaaaaaacttcaaaatgctgcttatggataatagtcatcttaaaaatgtacggaaaaagagactaaaatcagaaaaacatctgttatacattgacttaaagtcatcatctccgctatgagtcctcaatccaagttgacaaatgtttagccaggagttcccgtgaacgagcatctctctcatatggatgtacataccttgtttgaagaaatggacgagcaggctgatggaataacgtttaaatactcatttgatgacatagcaaagagcaacgcattggttgtcactgagtttgtcaattttgagcgtgacagcacggtagctttactcgccagccttcttactctcccggcacaccaatctcagtgtttgcgctttgagcttctgacgagccttgcactaattcactgcaaaggtcagcagatagcaaatatcgatgacgtgaaacgctggtatgtcactattggggagtcgagtagtatcgttggagaagatcctgctgaggacgtcttcgtcgcccttgttgataataaaaaaggtgattaccgtgtgctagagggggtttgggaggcggcaggtttttatacacaattaatggtcgaaattgtatccgacatgccggatacgcaccgctatcgctcgctgaaacttgctatacaggcaattctccgtctctcagatgtcatttgtgctcgctctggcctttatcgttttcaggaaggcgcagacgaattccctgactctcttgacaccgctggtcttgatgagaaaacgctctgttcaagggtaacgttgtccgagcgttctcttcgagctgaggggatcaaacttgctgacttagcacctttcattcttgaaccttctcatataagtatgcttggaaatcaggtccctggggagggaatgcttgaacaacggccattgctccgcacacgcgatggtattgtggttgtacttcctaccgccatgaccattgcacttcgccaggcagtgataacatttgcaaagcgcacagaagaattgagcgagctagacaaagcgttagctaacgtctacagccttactttctccgagatgccggtcttcggtaatggaggaaggttaagaagactgacatgggagaagtacaaaatgagccgaacaacgatggtaacctccatcgtggatgctggtcatttgatggtacttcagttcgttttgccttccatacagcaatatgccgataccggtttcaacaacttgctacagctagatgaagagaccacgcaatttctagataactctgttgaacaaattacagttgacctcgccaaacaacccggctttcagcgtggcatcgtcgtgcgcattgcatgtgggtggggggcgggttttatgggggtccctccccaactgccagatggttggggatttgaatggatgtctggtgcggactttgtccggttcggggcattacccgatatgtcaccaattgccttctggcgtgtgcaagacgcagtcgaaacgatcaggcaagctggtgttcgattaatcaatatgagcggaactctcaatcttcttgggtggatacgtgccaatgatggccatatggttcctcatgaccagttaccagatgaccgtatcacaccggaacacccgctaatgttaatgattcccacgaatttactccgtggtatacgaatagcggcagacacaggatatgaccggcatcgcattagtgacaacaatggtaaatggcatcgagtgatgaggccttcggcagaagatttctttcccaccgagcgtcagagcaagtgctacgcatcaattgatgatcttgaagcgcaacggctgacctgtgtatatgaggggcagggtaatctttgggtaacgctcgaagctccagaaatggaagattggatgctcctcgttgagcttgccaaaatggttcgaacatggattgggcggattggcgaggcactggaggtcttgagtgagcaaccaataaaaaaatcattaaaggtgtatctgcattttgatggtaacgacaatatcggcagatttgatggtgagaatttttctgatgatatgaatacattttggcgacttgaacgaatccatgagcatggggcgattcgtgtggttcttcaagatgggtatcttgcaggttttcgtctaccggataaccgtgcagaacgagctctggtgcgcgcactcggtacggcgtttgccacacttcttcggatgaaagagccagtagacaaaggggtcactgttgagcagatagcggtgcccaatgacagagcgcgcagcttccacataatgcaggcttatgacttcaaccaatatttaggccgttcactaactaaacgtcttttagctattgaagatatcgactcagccgcagcccgaattgagctagcatggcgtgctgtttcgacagatgcaccatcacgatatcagggtaaaaaggaagttggaaagctccttaatgatgtggttgatgtgctgatccaagacttactaagcgaactttcaagatttgaccgtaaacagacagtaatgcgattacttgaaaacgttgtaaaggcacgttgtgaagaggcgcactggcgtagtactgcagcagcggtccttggcttgcatgcaggagaagagggtgtcgaagagacgatagctcaagaaatgagccgttatgcgggcgcagcgttaacttcccggctaatcattgaacttgccatctgtgtgtgcccgacaagcggtggaattgaaccttctgatatggcactcagtaaacttcttgcacgggcatcactgctttttcgcataggtggtatgtcagatgccgtacgtttcggtgctttgcctgctgatattcgcatctcccccttaggtgatctcctctttcgcgatgaactcggcaaaatggtgcttgaaccaatgctttcaaaagttactaacgaacggtttgaggaacaagcggcacaattcgagcaacactatgtgaaaactgccggaggggatgatgagaatagcaaacaagatagtgttgcggctgaaaccaccgaggaccaaaccgatattttccttgcattctggaaagcagaaatgggcttcactctcgaggatggaatgcgatttatccagttccttgagtccatcggaatagagcaagaatcagcaatcttcgagatgcgaagaagccaattagcggatgctgctaaatcggctgggctcgcagatgaaactattgatgcgttcctcaaccagtttatccttagcgcgcgtccgaaatgggatgtagtgcccgatggatttgacctttctgatatatatccctggaggtttggccgacgcctttcagttgctgtacgtcccttgttacagattgaagagagtcacgatccactaattgttatcgcaccaggactcttgaatctgtcccttaaatacgttttcgatggcgcatacactgggcaatttaagcgtgacttctttcgcacagagggtatgagagacacttggttaggtggagcgcgggaaggacacacattcgaaaaaactttggagagagaacttcgtgaaataggctggacagttcgacgtggcataggctttcctgaaattcttcgcaggaatctaccaggtgatccgggggatattgatcttcttgcctggcgctcagaccgcaatcaagttctcgttatcgaatgtaaggacctctcacttgctcgtaattactcagaagttgcctcgcaactatctgaatatcaaggtgatgacataaagggcaaaccagataaactcaagaaacaccttaaacgcgtattactagccaaagaaaacatcgataattttgccaagttcacttcgatagcgaatcccgagattgtatcgtggctcgttttcagtggagcatctcccattgcctatgctcaatccaagattgaggctttggcaggaactaatgttggccgcccaagtgatcttctgaacttttgatagatatgctgtgcgataagacgccctggcaactaagttaatcgttcctactactgatagttttaaatcaagg

SEQ ID NO: 76 - protein, 4 aa, Artificial Sequence
  GlySer Linker
GGGS

SEQ ID NO: 77 - protein, 5 aa, Artificial Sequence
  GlySer Linker
GGGGS

SEQ ID NO: 78 - protein, 9 aa, Artificial Sequence
  GlySer Linker
GGSGGSGGS

SEQ ID NO: 79 - protein, 15 aa, Artificial Sequence
  GlySer Linker
GGGGSGGGGSGGGGS

SEQ ID NO: 80 - protein, 10 aa, Artificial Sequence
  GlySer Linker
GGGGSGGGGS

SEQ ID NO: 81 - protein, 20 aa, Artificial Sequence
  GlySer Linker
GGGGSGGGGSGGGGSGGGGS

SEQ ID NO: 82 - protein, 25 aa, Artificial Sequence
  GlySer Linker
GGGGSGGGGSGGGGSGGGGSGGGGS

SEQ ID NO: 83 - protein, 30 aa, Artificial Sequence
  GlySer Linker
GGGGSGGGGSGGGGSGGGGSGGGGSGGGGS

SEQ ID NO: 84 - protein, 35 aa, Artificial Sequence
  GlySer Linker
GGGGSGGGGSGGGGSGGGGSGGGGSGGGGSGGGGS

SEQ ID NO: 85 - protein, 40 aa, Artificial Sequence
  GlySer Linker
GGGGSGGGGSGGGGSGGGGSGGGGSGGGGSGGGGSGGGGS

SEQ ID NO: 86 - protein, 45 aa, Artificial Sequence
  GlySer Linker
GGGGSGGGGSGGGGSGGGGSGGGGSGGGGSGGGGSGGGGSGGGGS

SEQ ID NO: 87 - protein, 50 aa, Artificial Sequence
  GlySer Linker
GGGGSGGGGSGGGGSGGGGSGGGGSGGGGSGGGGSGGGGSGGGGSGGGGS

SEQ ID NO: 88 - protein, 55 aa, Artificial Sequence
  GlySer Linker
GGGGSGGGGSGGGGSGGGGSGGGGSGGGGSGGGGSGGGGSGGGGSGGGGSGGGGS

SEQ ID NO: 89 - protein, 60 aa, Artificial Sequence
  GlySer Linker
GGGGSGGGGSGGGGSGGGGSGGGGSGGGGSGGGGSGGGGSGGGGSGGGGSGGGGSGGGGS

SEQ ID NO: 90 - protein, 32 aa, Artificial Sequence
  Synthetic Linker
LEPGEKPYKCPECGKSFSQSGALTRHQRTHTR

SEQ ID NO: 91 - protein, 20 aa, Artificial Sequence
  Synthetic Linker
PKKKRKVEASSPKKRKVEAS

SEQ ID NO: 92 - DNA, 9 bp, Artificial Sequence
  Synthetic Linker
ggtggtagt

SEQ ID NO: 93 - DNA, 27 bp, Artificial Sequence
  Synthetic Linker
ggtggtagtggagggagcggcggttca

SEQ ID NO: 94 - DNA, 72 bp, Artificial Sequence
  Synthetic Linker
ggtggaggaggctctggtggaggcggtagcggaggcggagggtcgggtggtagtggagggagcggcggttca

SEQ ID NO: 95 - DNA, 48 bp, Artificial Sequence
  Synthetic Linker
tcgggatctgagacgcctgggacctcggaatcggctacgcccgaaagt

SEQ ID NO: 96 - DNA, 192 bp, Artificial Sequence
  Synthetic Linker
gtggataacaaatttaacaaagaaatgtgggcggcgtgggaagaaattcgtaacctgccgaacctgaacggctggcagatgaccgcgtttattgcgagcctggtggatgatccgagccagagcgcgaacctgctggcggaagcgaaaaaactgaacgatgcgcaggcgccgaaaaccggcggtggttctggt

SEQ ID NO: 97 - DNA, 108 bp, Artificial Sequence
  Synthetic Linker
ggtggttctgccggtggctccggttctggctccagcggtggcagctctggtgcgtccggcacgggtactgcgggtggcactggcagcggttccggtactggctctggc

SEQ ID NO: 98 - DNA, 48 bp, Escherichia coli
gctaacttacattaattgcgttgcgcaacagcaccacgttcatcttcc

SEQ ID NO: 99 - DNA, 60 bp, Escherichia coli
ccaaggggttatgctagttattgcggttcattaaaatagttactacgttaattcacaccc

SEQ ID NO: 100 - DNA, 49 bp, Escherichia coli
gctaacttacattaattgcgttgcgcaggtgaacgtttggttgataggg

SEQ ID NO: 101 - DNA, 52 bp, Escherichia coli
ccaaggggttatgctagttattgcgctcaatgggcataattttacattgtgc

SEQ ID NO: 102 - DNA, 48 bp, Escherichia coli
gctaacttacattaattgcgttgcgcaacatcccgtcatcatgccatc

SEQ ID NO: 103 - DNA, 51 bp, Escherichia coli
ccaaggggttatgctagttattgcgctcctcggaatagaatgttatgttcg

SEQ ID NO: 104 - DNA, 49 bp, Escherichia coli
gctaacttacattaattgcgttgcgcacgcgctatcacgtaaaataggc

SEQ ID NO: 105 - DNA, 52 bp, Escherichia coli
ccaaggggttatgctagttattgcgcgaaaaatcagccttagcgttcataac

SEQ ID NO: 106 - DNA, 49 bp, Escherichia coli
gctaacttacattaattgcgttgcgcagctcatgttatgcatgtgcatg

SEQ ID NO: 107 - DNA, 54 bp, Escherichia coli
ccaaggggttatgctagttattgcgattaggtcttcgctttatttaaagggttc

SEQ ID NO: 108 - DNA, 54 bp, Klebsiella pneumoniae
gagctaacttacattaattgcgttgcgcagtccttaaacacgacaaaacctgtg

SEQ ID NO: 109 - DNA, 45 bp, Klebsiella pneumoniae
cccaaggggttatgctagttattgcgcgcaatgtaacacccaccc

SEQ ID NO: 110 - DNA, 49 bp, Escherichia coli
gctaacttacattaattgcgttgcgcatctcaacttccccaaatgtccg

SEQ ID NO: 111 - DNA, 50 bp, Escherichia coli
cccaaggggttatgctagttattgcgttagcaaaatacgcccacgaagtc

SEQ ID NO: 112 - DNA, 54 bp, Citrobacter rodentium
gctaacttacattaattgcgttgcgcagaggatttatgcacaaaatcctgatgc

SEQ ID NO: 113 - DNA, 49 bp, Citrobacter rodentium
ccaaggggttatgctagttattgcggatttaatctgttgttccgaacgg

SEQ ID NO: 114 - DNA, 48 bp, Escherichia coli
gctaacttacattaattgcgttgcgcaaccgtgctggcatgtttttac

SEQ ID NO: 115 - DNA, 46 bp, Escherichia coli
ccaaggggttatgctagttattgcgaggaagatccgtgaccaggag

SEQ ID NO: 116 - DNA, 53 bp, Escherichia coli
gctaacttacattaattgcgttgcgcagaaattatttggaatggatgatggcg

SEQ ID NO: 117 - DNA, 54 bp, Escherichia coli
ccaaggggttatgctagttattgcgacttctacctccctttagaaaagttaatg

SEQ ID NO: 118 - DNA, 57 bp, Escherichia coli
gctaacttacattaattgcgttgcgcacggattgaatctgtttatgaaatttggctg

SEQ ID NO: 119 - DNA, 52 bp, Escherichia coli
ccaaggggttatgctagttattgcgccgacagttgtcactgttcttattacc

SEQ ID NO: 120 - DNA, 60 bp, Vibrio harveyi
ccctgataaatgcttcaataatattgaaaaaggaagagtatggcgggtgcttcaatagac

SEQ ID NO: 121 - DNA, 59 bp, Vibrio harveyi
cccaaggggttatgctagttattgcgttagttacttgctttgtagaataccgttaatgg

SEQ ID NO: 122 - DNA, 51 bp, Erwinia piriflorinigrans
cccaaggggttatgctagttattgcgtcaatccgtagcctcttcattctcg

SEQ ID NO: 123 - DNA, 60 bp, Erwinia piriflorinigrans
ataaatgcttcaataatattgaaaaaggaagagtatggtagcgataaaaatgtatccggc

SEQ ID NO: 124 - DNA, 53 bp, Salmonella enterica
gctaacttacattaattgcgttgcgcaacaattttttgccataagacgctttc

SEQ ID NO: 125 - DNA, 52 bp, Salmonella enterica
ccaaggggttatgctagttattgcgcattaggactagtagaaaagtcttggg

SEQ ID NO: 126 - DNA, 46 bp, Escherichia coli
gctaacttacattaattgcgttgcgcagggatttccaccacctccc

SEQ ID NO: 127 - DNA, 50 bp, Escherichia coli
ccaaggggttatgctagttattgcgtgcatagccaatgaagataaacgtg

SEQ ID NO: 128 - DNA, 48 bp, Escherichia coli
gctaacttacattaattgcgttgcgcagcgcagctgacaaagattgac

SEQ ID NO: 129 - DNA, 51 bp, Escherichia coli
ccaaggggttatgctagttattgcgcgataataaaaaggctccaatccctg

SEQ ID NO: 130 - DNA, 48 bp, Escherichia coli
gctaacttacattaattgcgttgcgcaactagctaagcaataagggcg

SEQ ID NO: 131 - DNA, 43 bp, Escherichia coli
ccaaggggttatgctagttattgcgcaatctccgaggtggccc

SEQ ID NO: 132 - DNA, 52 bp, Escherichia coli
gctaacttacattaattgcgttgcgcatattttgcgtagctagaacgcaatc

SEQ ID NO: 133 - DNA, 56 bp, Escherichia coli
ccaaggggttatgctagttattgcgtgggtattagctcatatcagaactaataccc

SEQ ID NO: 134 - DNA, 49 bp, Cronobacter sakazakii
gctaacttacattaattgcgttgcgcagtaagacaagggttgagcaggc

SEQ ID NO: 135 - DNA, 52 bp, Cronobacter sakazakii
ccaaggggttatgctagttattgcgcaatggtgggctgattaattagatgag

SEQ ID NO: 136 - DNA, 55 bp, Escherichia coli
gctaacttacattaattgcgttgcgcatagctattgtgactatgctaaccatatg

SEQ ID NO: 137 - DNA, 51 bp, Escherichia coli
ccaaggggttatgctagttattgcgttcagtctaaatacatacctgtcggg

SEQ ID NO: 138 - DNA, 50 bp, Escherichia coli
gctaacttacattaattgcgttgcgcagtgcgccttatgtgattacaacg

SEQ ID NO: 139 - DNA, 51 bp, Escherichia coli
ccaaggggttatgctagttattgcgctctcagcctaatgattccagaatag

SEQ ID NO: 140 - DNA, 52 bp, Escherichia coli
gctaacttacattaattgcgttgcgcacgtgatgaatgaagcggctaaatac

SEQ ID NO: 141 - DNA, 48 bp, Escherichia coli
ccaaggggttatgctagttattgcggtaaatcctcgggaaaacacagg

SEQ ID NO: 142 - DNA, 52 bp, Escherichia coli
gctaacttacattaattgcgttgcgcagatggactggtactgtagattcacc

SEQ ID NO: 143 - DNA, 46 bp, Escherichia coli
ccaaggggttatgctagttattgcgcaaagacgcagaggccatcag

SEQ ID NO: 144 - DNA, 54 bp, Salmonella enterica
gctaacttacattaattgcgttgcgcagggctgtttggttgaattaaaaatacg

SEQ ID NO: 145 - DNA, 56 bp, Salmonella enterica
ccaaggggttatgctagttattgcgccttgatttaaaactatcagtagtaggaacg

SEQ ID NO: 146 - DNA, 53 bp, Escherichia coli
gctaacttacattaattgcgttgcgcaatagaacgatgaaggatggaagctac

SEQ ID NO: 147 - DNA, 49 bp, Escherichia coli
ccaaggggttatgctagttattgcgttgtattttgttgtgtatgggcgg

SEQ ID NO: 148 - DNA, 47 bp, Escherichia coli
gctaacttacattaattgcgttgcgcacgtgattcagttcgccagac

SEQ ID NO: 149 - DNA, 47 bp, Escherichia coli
ccaaggggttatgctagttattgcgcactcgaaatggataccctgag

SEQ ID NO: 150 - protein, 201 aa, Escherichia coli
MIKNDKAWIGDLLGGPLMSRESRVIAELLLTDPDEQTWQEQIVGHNILQASSPNTAKRYAATIRLRLNTLDKSAWTLIAEGSERERQQLLFVALMLHSPVVKDFLAEVVNDLRRQFKEKLPGNSWNEFVNSQVRLHPVLASYSDSSIAKMGNNLVKALAEAGYVDTPRRRNLQAVYLLPETQAVLQRLGQQDLISILEGKR

SEQ ID NO: 151 - protein, 200 aa, Escherichia coli
MIDPVLEYRLSQIQSRINEDRFLKNNGSGNEIGFWIFDYPAQCELQVREHLKYLLRHLEKDHKFACLNVFQIIIDMLNERGLFERVCQQEVKVGTETLKKQLAGPLNQKKIADFIAKKVDLAAQDFVILTGMGNAWPLVRGHELMSALQDVMGFTPLLMFYPGTYSGYNLSPLTDTGSQNYYRAFRLVPDTGPAATLNPQ

SEQ ID NO: 152 - protein, 1213 aa, Escherichia coli
MNIEQIFEKPLKRNINGVVKAEQTDDASAYIELDEYVITRELENHLRHFFESYVPATGPERIRMENKIGVWVSGFFGSGKSHFIKILSYLLSNRKVTHNGTERNAYSFFEDKIKDALFLADINKAVHYPTEVILFNIDSRANVDDKEDAILKVFLKVFNERIGYCADFPHIAHLERELDKRGQYETFKAAFADINGSRWEDERDAYYFISDDMAQALSQATQQSLESSRQWVEQLDKNFPLDINNFCQWVKEWLDDNGKNILFMVDEVGQFIGKNTQMMLKLQTITENLGVICGGRAWVIVTSQADINAAIGGMSSRDGQDFSKIQGRFSTRLQLSSSNTSEVIQKRLLVKTDEAKAALAKVWQEKADILRNQLAFDTTTTTALRPFTSEEEFVDNYPFVPWHYQILQKVFESIRTKGAAGKQLAMGERSQLEAFQTAAQQISAQGLDSLVPFWRFYAAIESFLEPAVSRTITQACQNGILDEFDGNLLKTLFLIRYVETLKSTLDNLVTLSIDRIDADKVELRRRVEKSLNTLERLMLIARVEDKYVFLTNEEKEIENEIRNVDVDFSAINKKLASIIFDDILKSRKYRYPANKQDFDISRFLNGHPLDGAVLNDLVVKILTPKDPTYSFYNSDATCRPYTSEGDGCILIRLPEEGRTWSDIDLVVQTEKFLKDNAGQRPEQATLLSEKARENSNREKLLRVQLESLLAEADVWAIGERLPKKSSTPSNIVDEACRYVIENTFGKLKMLRPFNGDISREIHALLTVENDTELDLGNLEESNPDAMREVETWISMNIEYNKPVYLRDILNHFARRPYGWPEDEVKLLVARLACKGKFSFSQQNNNVERKQAWELFNNSRRHSELRLHKVRRHDEAQVRKAAQTMADIAQQPFNEREEPALVEHIRQVFEEWKQELNVFRAKAEGGNNPGKNEIESGLRLLNAILNEKEDFALIEKVSSLKDELLDFSEDREDLVDFYRKQFATWQKLGAALNGSFKSNRSALEKDAAAVKALGELESIWQMPEPYKHLNRITPLIEQVQNVNHQLVEQHRQHALERIDARIEESRQRLLEAHATSELQNSVLLPMQKARKRAEVSQSIPEILAEQQETKALQMDADKKINLWIDELRKKQEAQLRAANEAKRAADSEQTYVVVEKTVIQPVPKKTHLVNVASEMRNATGGEVLETTEQVEKALDTLRTTLLAVIKAGDRIRLQ

SEQ ID NO: 153 - protein, 1201 aa, Escherichia coli
MNTNNIKKYAPQARNDFRDAVIQKLTTLGIAADKKGNLQIAEAETIGETVRYGQFDYPLSTLPRRERLVKRAREQGFEVLVEHCAYTWFNRLCAIRYMELHGYLEHGFRMLSHPETPTAFEVLDHVPEVAEALLPENKAQLVEMKLSGNQDEALYRELLLGQCHALHHAMPFLFEAVDDEAELLLPDNLTRTDSILRGLVDDIPEEDWEQVEVIGWLYQFYISEKKDAVIGKVVKSEDIPAATQLFTPNWIVQYLVQNSVGRQWLQTYPDSPLKDKMEYYIEPAEQTPEVQAQLAAITPASIEPESIKVLDPACGSGHILIEAYNVLKNIYEERGYRGRDIPQLILENNIFGLDIDDRAAQLSGFALLMMARQDDRRIFTRDVRLNIVSLQESLHLDIAKLWQQLNFHQQVQTGSMGDMFAENNALTQTDSAEYQLLMRTLKRFVNAKTLGSLIQVPQEEEAELKVFLDALYRLEQEGDFQQKTAAKAFIPFIQQAWILAQRYDAVVANPPYMGGNYMETELKNFVSSYYPQGKADLYSSFMVRLLLQLKDNRTLSLMTPFTWMNLSSFEELRKIILTNFSIQSLVQPEYHSFFESAYVPICAFSISNTPLSWNAKFFDLSDFYGEKNQAPNFQYAIKNDNKCHWKYNRITTDFLCTPGYIIAYSLPDSALSCFKTSKKLHDVCNLKQGLITGDNERYLRFWHEISYNSFSLNEKRKKTKWFPYQKGGAYRKWYGNNDYVVDWENDGYSIKNFYNDKGKLRSRPQNIQFYCKEGLTWTSLTISSLSMRYVPNGYIFDAKGPMCFPKSSLDIWNILGYANSKVIDIFLKQLAPTMDYSQGPVGNVPFKFNDGDLNEIIKELVNIHKRDWDENETSFEFKRDMLVHFSRDINTIKGSFTLRQGENKKAINRTKFLEEMNNSFFINCFNLTDILSPEIELNKITLTHATIEIDIQKIISYAIGCQMGRYSLDREGLVYAHEGNNGFADLVAEGAYKSFPADSDGILPLMDEEWFDDDVTSRVKEFIRTVWGEEYLRENLDFIAEVLKPKKGESALETIRRYLSTQFWKDHLKMYKKRPIYWLFSSGKEKAFECLVYLHRYNDATLSRMRTEYVVPLLARYQANIDRLNDQLDEASGGESTRLKRERDSLIKKFSELRSYDDRLRHYADMRISIDLDDGVKVNYGKFGDLLADVKAITGNAPEVI

SEQ ID NO: 154 - protein, 865 aa, Escherichia coli
MQNQDFIAGLKAKFAEHRIVFWHDPDKRFIEELEQLKLESVTLINMTHESQLAVKKRIEIDEPEQQFLLWFPHDAPPHEQDWLLDIRLYSSEFHADFAAITLNTLGIPQLGLREHIQRRKAFFSTKRTQALKNLATEQEDEASLDKKMIAVIAGAKTAKTEDILFNLITQYVNQQIEDDSELENTQAMLKRHGLDSVLWEMLNHEMGYQAEEPSLENLLLKLFCTDLSAQADPQQRAWLEKNVLLTPSGRASALAFMVTWRADRRYKEAYDYCAQQMQAALHPEDHYRLSSPYDLHECETTLSIEQTIIHALVTQLLEESTTLDREAFKKLLSERQSKYWCQTQPEYYAIYDALRQAERLLNLRNRHIDGFHYQDSATFWKAYCEELFRFDQAYRLFNEYALLVHSKGAMILKSLDDYIEALYSNWYLAELSRNWNEVLEAENRMQAWQIPGVPRQQNFFNEVVKPQFQNPQIKRVFVIISDALRYEVAEELGNQINTEKRFTAELRSQLGVLPSYTQLGMAALLPHEQLCYQPGNGDIVYADGLSTSGIPNRDTILKNYKGMAIKSKDLLELKNQEGRDLIRDYEVVYIWHNTIDATGDTASTEDKTFEACRTAVAELKDLVTKVINRLHGTRIFVTADHGFLFQQQALSVQDKTTLQIKPENTIKNHKRFIIGHQLPADDFCWKGKVADTAGVSDNSEFLIPKGIQRFHFSGGARFVHGGTMLQEVCVPVLQIKALQKTAAEKQPQRRPVDIVAYHPMIKLVNNIDKVSLLQTHPVGELYEPRILNIYIVDNANNVVSGKERISFDSDNNTMEKRVREVTLKLIGANFNRRNEYWLILEDAQTETGYQKYPVIIDLAFQDDFF

SEQ ID NO: 155 - protein, 694 aa, Escherichia coli
MQTHHDLPVSGVSAGEIASEGYDLDALLNQHFAGRVVRKDLTKQLKEGANVPVYVLEYLLGMYCASDDDDVVEQGLQNVKRILADNYVRPDEAEKVKSLIRERGSYKIIDKVSVKLNQKKDVYEAQLSNLGIKDALVPSQMVKDNEKLLTGGIWCMITVNYFFEEGQKTSPFSLMTLKPIQMPNMDMEEVFDARKHFNRDQWIDVLLRSVGMEPANIEQRTKWHLITRMIPFVENNYNVCELGPRGTGKSHVYKECSPNSLLVSGGQTTVANLFYNMASRQIGLVGMWDVVAFDEVAGITFKDKDGVQIMKDYMASGSFSRGRDSIEGKASMVFVGNINQSVETLVKTSHLLAPFPTAMIDTAFFDRFHAYIPGWEIPKMRPEFFTNRYGLITDYLAEYMREMRKRSFSDAIDKFFKLGNNLNQRDVIAVRRTVSGLLKLMHPDGAYSKEDVRVCLTYAMEVRRRVKEQLKKLGGLEFFDVNFSYIDNETLEEFFVSVPEQGGSELIPAGMPKPGVVHLVTQAESGMTGLYRFETQMTAGNGKHSVSGLGSNTSAKEAIRVGFDYFKGNLNRVSAAAKFSDHEYHLHVVELHNTGPSTATSLAALIALCSILLAKPVQEQMVVLGSMTLGGVINPVQDLAASLQLAFDSGAKRVLLPMSSAMDIPTVPAELFTKFQVSFYSDPVDAVYKALGVN

SEQ ID NO: 156 - protein, 404 aa, Escherichia coli
MHKYPSIIVNINLREAKLKKKVREHLQSLGFTRSDSGALQAPGNTKDVIRALHSSQRAERIFANQKFITLRAAKLIKFFASGNEVIPDKISPVLERVKSGTWQGDLFRLAALTWSVPVSSGFGRRLRYLVWDESNGKLIGLIAIGDPVFNLAVRDNLIGWDTHARSSRLVNLMDAYVLGALPPYNALLGGKLIACLLRSRDLYDDFAKVYGDTVGVISQKKKQARLLAITTTSSMGRSSVYNRLKLDGIQYLKSIGYTGGWGHFHIPDSLFIELRDYLRDMDHAYADHYMFGNGPNWRLRTTKAALNALGFRDNLMKHGIQREVFISQLAENATSILQTGKGEPDLTSLLSAKEIAECAMARWMVPRSIRNPEYRLWKARDLFDFISNDSLNFPPFDEIAKTVV

SEQ ID NO: 157 - protein, 548 aa, Escherichia coli
MNYAIDKFTGTLILAARATKYAQYVCPVCKKGVNLRKGKVIPPYFAHLPGHGTSDCENFVPGNSIIVETIKTISKRYMDLRLLIPVGSNSREWSLELVLPTCNLCRAKITLDVGGRSQTLDMRSMVKSRQIGAELSVKSYRIVSYSGEPDPKFVTEVERECPGLPSEGAAVFTALGRGASKGFPRAQELRCTETFAFLWRHPVAPDFPDELEIKSLASKQGWNLALVTIPEVPSVESISWLKSFTYLPVVPARTSITAIWPFLNQKTSINHVECVYSDTILLSTNMAPTSSENVGPTMYAQGSSLLLSAVGVETSPAFFILNPGENDFVGVSGSIEQDVNLFFSFYKKNVSVPRKYPSIDLVFTKRNKEKTIVSLHQRRCIEVMMEARMFGHKLEYMSMPSGVEGVARIQRQTESNVIKLVSNDDIAAHDKSMRLLSPVALSQLSDCLANLTCHVEIDFLGLGKIFLPGSSMLSLDDGKFIELSPNLRSRILSFILQMGHTLHGFSLNNDFLLVEKLVDLQPEPHLLPHYRALVKEVKTNGFECNRFR

SEQ ID NO: 158 - protein, 627 aa, Escherichia coli
MSYQYSQEAKERISKLGQSEIVNFINEISPTLRRKAFGCLPKVPGFRAGHPTEIKEKQKRLIGYMFQSHPSSEERKAWKSFSLFWQFWAEEKIDKSFSMIDNLGLKENSGSIFIRELAKNFPKVARENIERLFIFSGFADDPDVINAFNLFPPAVVLARDIVIDTLPIRLDELEARISLIADNVEKKNNHIKELELKIDAFSEQFDNYFNNEKSSLKIINELQSLINSETKQSDIANKAIDELYHFNEKNKQLILSLQEKLDFNALAMNDISEHEKLIKSMANDISEFKNALTILCDNKIKNNELDYVNELKKLTERIDTLEINTSQASEVSVTNRFTKFHEIAHYENYEYLSSSEDISNRISLNLQAVGLTKNSAEKLARLTLATFVSGQIIQFSGSLADIIADAIAIAIGAPRYHIWRVPVGIISDMDAFDFIETIAESSRCLLLKGANLSAFEIYGAAIRDIVVQRQIHPTNYDHLALIATWKQGPATFPDGGMLAELGPVIDTDTLKMRGLSATLPQLKPGCLAKDKWTNIDGLHLDSVDDYVDELRALLDEAGFDGGTLWKRMIHIFYTSLIRIPNGNYIYDLYSVLSFYTLTWAKIKGGPVQKIEDIANRELKNYSAKISS

SEQ ID NO: 159 - protein, 347 aa, Escherichia coli
MEWRAVSRDKALDMLSTALNCRFDDEGLRISAVSECLRSVLYQYSISETEEARQTVTSLRLTSAVRRKLVPLWPDIADIDNAIHPGIMSILNSLAELGDMIKLEGGNWLTAPPHAVRIDNKMAVFFGGEPSCTFSTGVVAKSAGRVRLVEEKVCTGSVEIWDANEWIGAPAEGNEEWSSRLLSGTISGFIDAPGNMSETTAYVRGKWLHLSELSFNKKQIYLCRMSVDNHFSYYLGEIEAGRLCRMNSLESSDDVRRLRFFLDTKDNCPLKVRIKISNGLARLRLTRRLPRRETKVLLLGWRESGFENEHSGITHHVFPEEILPIVRSAFEGLGIIWINEFTRRNEI

SEQ ID NO: 160 - protein, 1836 aa, Escherichia coli
MINKNKVTERSGIHDTVKSLSENLRKYIEAQYHIRDEGLIAERRALLQQNETIAQAPYIEATPIYEPGAPYSELPIPEAASNVLTQLSELGIGLYQRPYKHQSQALESFLGENASDLVIATGTGSGKTESFLMPIIGKLAIESSERPKSASLPGCRAILLYPMNALVNDQLARIRRLFGDSEASKILRSGRCAPVRFGAYTGRTPYPGRRSSRRDELFIKPLFDEFYNKLANNAPVRAELNRIGRWPSKDLDAFYGQSASQAKTYVSGKKTGKQFVLNNWGERLITQPEDRELMTRHEIQNRCPELLITNYSMLEYMLMRPIERNIFEQTKEWLKADEMNELILVLDEAHMYRGAGGAEVALLIRRLCARLDIPRERMRCILTSASLGSIEDGERFAQDLTGLSPTSSRKFRIIEGTRESRPESQIVTSKEANALAEFDLNSFQCVAEDLESAYAAIESLAERMGWQKPMIKDHSTLRNWLFDNLTGFGPIETLIEIVSGKAVKLNILSENLFPDSPQQIAERATDALLALGCYAQRASDGRVLIPTRMHLFYRGLPGLYACIDPDCNQRLGNHSGPTILGRLYTKPLDQCKCASKGRVYELFTHRDCGAAFIRGYVSSEMDFVWHQPNGPLSEDEDIDLVPIDILVEETPHVHSDYQDRWLHIATGRLSKQCQDEDSGYRKVFIPDRVKSGSEITFDECPVCMRKTRSAQNEPSKIMDHVTKGEAPFTTLVRTQISHQPASRPIDGKHPNGGKKVLIFSDGRQKAARLARDIPRDIELDLFRQSIALACSKLKDINREPKPTSVLYLAFLSVLSEHDLLIFDGEDSRKVVMARDEFYRDYNSDLAQAFDDSFSPQESPSRYKIALLKLLCSNYYSLSGTTVGFVEPSQLKSKKMWEDVQSKKLNIESKDVHALAVAWIDTLLTEFAFDESIDSTLRIKAAGFYKPTWGSQGRFGKALRKTLIQYPAMGELYVEVLEEIFRTHLTLGKDGVYFLAPNALRLKIDLLHVWKQCNDCTALMPFALEHSTCLACGSNSVKTVEPSESSYINARKGFWRSPVEEVLVSNSRLLNLSVEEHTAQLSHRDRASVHATTELYELRFQDVLINDNDKPIDVLSCTTTMEVGVDIGSLVAVALRNVPPQRENYQQRAGRAGRRGASVSTVVTYSQNGPHDSYYFLNPERIVAGSPRTPEVKVNNPKIARRHVHSFLVQTFFHELMEQGIYNPAEKTAILEKALGTTRDFFHGAKDTGLNLDSFNNWVKNRILSTNGDLRTSVAAWLPPVLETGGLSASDWFAKVAEEFLNTLHGLAEIVPQTAVLVDEENEDDEQTSGGMKFAQEELLEFLFYHGLLPSYAFPTSLCSFLVEKIVKNIRGSFEVRTVQQPQQSISQALSEYAPGRLIVIDRKTYRSGGVFSNALKGELNRARKLFNNPKKFIHCDKCSFVRDPHNNQNSENTCPICGGILKVEIMIQPEVFGPENAKELNEDDREQEITYVTAAQYPQPVDPEDFKFNNGGAHIVFTHAIDQKLVTVNRGKNEGESSGFSVCCECGAASVYDSYSPAKGAHERPYKYIATKETPRLCSGEYKRVFLGHDFRTDLLLLRITVGSPLVTDTSNAIVLRMYEDALYTIAEALRLAASRHKQLDLDPAEFGSGFRILPTIEEDTQALDLFLYDTLSGGAGYAEVAAANLDDILTATLALLESCECDTSCTDCLNHFHNQHIQSRLDRKLGASLLRYALYGMVPRCASPDIQVEKLSQLRASLELDGFQCIIKGTQEAPMIVSLNDRSIAVGSYPGLIDRPDFQHDVYKSKHTNAHIAFNEYLLRSNLPQSHQNIRKMLR

SEQ ID NO: 161 - protein, 515 aa, Escherichia coli
MKKVYELTSEEALSYFLRHDSYTTLELPAYINFTTLLNDINSSIHNKKIKIEPTAKELMGKDINYEVLVSKDGLYSWRRITLINPLYYVYFCRKITAPATWEIITEKFKSFESNDLFTCSSIPVRKDNSSNIAASVMNWWEDFEQKSLALALEYEFMFSTDISNFYPSIYTHSFEWVFISKEEAKKKKSKNNPGGLIDSHIQMMMNNQTNGIPLGSTLMDTFAELILGQIDIELRKKTNELKIINYKVVRYRDDYRIFSNSKDDLDIISKCLVNVLGDFGLDLNSKKTELYEDIILHSLKQAKKDYIKEKRHKSLQKMLYSIYLFSLKHPNSKTTVRYLNDFLRNLFKRKTIKDNGQQVDAMLGIISSIMAKNPTTYPVGTAIFSKLLSFLYGDDTQKKLTKLEQLHKKLDKQPNTEMLDIWFQRTQAKINLEWNKSYKSALCVRINDELTKEKTFSVNNLWNIDWIQGKETSPNKAKILSLLRKTKIVDTDKFDKMDDNITPEEVNLFFKEHSN

SEQ ID NO: 162 - protein, 542 aa, Shigella dysenteriae
MSLHDKLLMHNFALANKKSPDFISELPQIEPKPYSNGHKIKWINHTLTSTEVTPPDNLIKICILIESGEIAITSVSDIANLLGVPAGQLLYILYRKKDNYRTFEIEKKNGKKRVINAPCGGLSILQTRLKPVLEYFYRPKKSAHGFIKGKSIITNAGMHIKKNFVVNIDLENYFESISFARVYGIFKSKPFNFAHPAATVLAQLCTHNGKLPQGACTSPILANIASASLDKQLTQFAGRKKISYSRYADDITFSFNQRNIDIIKKNDDGSYSLSETIDNIISKNGFKINYDKFRVQTRNTRQSVTGLVVNDKVNINRRYIRITRSMIHRWTDDKLKYALLFATEKGYQAKDNNHAIQIFRNHIYGRLSFIKMVRGKDYPGYLKLMSYMSHNDPLKTQEGLRAMKETENFDVFICHASEDKKDIAIPIYDELTKLKISAFIDHVEIKWGDSLIDKINAALVKSKYVIAILSANSVNKEWPQKELRAVLASEISSGDVKLLTLLKKEDEEVVNLSLPLLSDKFYMVYDNNPEVVANNIKSLLQR

SEQ ID NO: 163 - protein, 586 aa, Escherichia coli
MTKTSKLDALRAATSREDLAKILDVKLVFLTNVLYRIGSDNQYTQFTIPKKGKGVRTISAPTDRLKDIQRRICDLLSDCRDEIFAIRKISNNYSFGFERGKSIILNAYKHRGKQIILNIDLKDFFESFNFGRVRGYFLSNQDFLLNPVVATTLAKAACYNGTLPQGSPCSPIISNLICNIMDMRLAKLAKKYGCTYSRYADDITISTNKNTFPLEMATVQPEGVVLGKVLVKEIENSGFEINDSKTRLTYKTSRQEVTGLTVNRIVNIDRCYYKKTRALAHALYRTGEYKVPDENGVLVSGGLDKLEGMFGFIDQVDKFNNIKKKLNKQPDRYVLTNATLHGFKLKLNAREKAYSKFIYYKFFHGNTCPTIITEGKTDRIYLKAALHSLETSYPELFREKTDSKKKEINLNIFKSNEKTKYFLDLSGGTADLKKFVERYKNNYASYYGSVPKQPVIMVLDNDTGPSDLLNFLRNKVKSCPDDVTEMRKMKYIHVFYNLYIVLTPLSPSGEQTSMEDLFPKDILDIKIDGKKFNKNNDGDSKTEYGKHIFSMRVVRDKKRKIDFKAFCCIFDAIKDIKEHYKLMLNS

SEQ ID NO: 164 - protein, 307 aa, Escherichia coli
MNKKFTDEQQQQLIGHLTKKGFYRGANIKITIFLCGGDVANHQSWRHQLSQFLAKFSDVDIFYPEDLFDDLLAGQGQHSLLSLENILAEAVDVIILFPESPGSFTELGAFSNNENLRRKLICIQDAKFKSKRSFINYGPVRLLRKFNSKSVLRCSSNELKEMCDSSIDVARKLRLYKKLMASIKKVRKENKVSKDIGNILYAERFLLPCIYLLDSVNYRTLCELAFKAIKQDDVLSKIIVRSVVSRLINERKILQMTDGYQVTALGASYVRSVFDRKTLDRLRLEIMNFENRRKSTFNYDKIPYAHP

SEQ ID NO: 165 - protein, 320 aa, Escherichia coli
MKSAEYLNTFRLRNLGLPVMNNLHDMSKATRISVETLRLLIYTADFRYRIYTVEKKGPEKRMRTIYQPSRELKALQGWVLRNILDKLSSSPFSIGFEKHQSILNNATPHIGANFILNIDLEDFFPSLTANKVFGVFHSLGYNRLISSVLTKICCYKNLLPQGAPSSPKLANLICSKLDYRIQGYAGSRGLIYTRYADDLTLSAQSMKKVVKARDFLFSIIPSEGLVINSKKTCISGPRSQRKVTGLVISQEKVGIGREKYKEIRAKIHHIFCGKSSEIEHVRGWLSFILSVDSKSHRRLITYISKLEKKYGKNPLNKAKT

SEQ ID NO: 166 - protein, 425 aa, Salmonella enterica
MNNDDYPWFRKRGYLHFDEPVSLKKAVKYVSSPEKIIKHSFLPFLSFEVKSFKIKKDKSTKQLSKTEKLRPIAYSSHLDSHIYAFYAEYLTGHYELLIQENNLHENILAFRSLNKSNIEFAKRAFDTITEMGECSAVALDLSGFFDNLDHQILKHQWCKVIGTEALPQDHFAIYKSITRYSKVDKNRAYEILGISKNNPKYNRRKICTPVDFRNKIRKNGLIIVNNSQKGIPQGSPISALLSNIYMLDFDIEMRDYAQERGGHYYRYCDDMLFIVPTKYNKTLAGDVAQRIKHLKVELNTKKTEIRDFIYKDSTLVANMPLQYLGFIFDGSNILLRSSSLARYSERMKRGVRLAKATMDSKNRIRENKGEALKALFKKKLYARYSHIGRRNFLTYGYRAAKIMNSKAIKRQLKPLQKRLENEILK

SEQ ID NO: 167 - protein, 540 aa, Escherichia coli
MVIFDEKRHLYEALLRHNYFPNQKGSISEIPPCFSSRTFTPEIAELISSDTSGRRSLQGYDCVEYYATRYNNFPRTLSIIHPKAYSKLAKHIHDNWEEIRFIKENENSMIKPDMHADGRIIIMNYEDAETKTIRELNDGFGRRFKVNADISGCFTNIYSHSIPWAVIGVNNAKIALNTKVKNQDKHWSDKLDYFQRQAKRNETHGVPIGPATSSIVCEIILSAVDKRLRDDGFLFRRYIDDYTCYCKTHDDAKEFLHLLGMELSKYKLSLNLHKTKITNLPGTLNDNWVSLLNVNSPTKKRFTDQDLNKLSSSEVINFLDYAVQLNTQVGGGSILKYAISLVINNLDEYTITQVYDYLLNLSWHYPMLIPYLGVLIEHVYLDDGDEYKNKFNEILSMCAENKCSDGMAWTLYFCIKNNIDIDDDVIEKIICFGDCLSLCLLDSSDIYEEKINNFVSDIIKLDYEYDIDRYWLLFYQRFFKDKAPSPYNDKCFDIMKGYGVDFMPDENYKTKAESYCHVVNNPFLEDGDEIVSFNDYMAIA

SEQ ID NO: 168 - protein, 494 aa, Escherichia coli
MTSTIDFYESDFSATLYPLKTNQILLKHHSQEMSEYIYQKVINPAYPTDSFLSQQKVFSTKPKGHLRRTVKLDPVAEYFIYDVIYRNRKIFRPEVSESRKSFGYIFRNGSRIPIHVSYNEYKQSLKKYSELYSHSIHFDIASYFNSLYHHDIIHWFSSKEGVSPADVEALGQFFREINSGRSIDFMPQGIYPAKMIGNEFLKFVDLHGRLKSAQIVRFMDDFTIFDNDIETLNNDFIRIQQLLGQVSLNINPSKTTFDNVMGDVNETLTQIKSSLKEIITEYEHIPTASGVEVVETNIEIIKHLDDEQVNKLIDLLKDEKIEESDADLILGFLRTHNDSLLSQMPMLLGRFPNLIKHIYTICSGITDKSGLVKILLSYLNTNNNFLEYQLFWIGAIVEDYLLGVGEYGSVLHKLYELSGDFKIARAKVLEIPEQGFGFKEIRNEYLRTGQSDWLSWSSAIGTRNLKSAERNYILDYFSKGSPINYLVASCVKKL

SEQ ID NO: 169 - protein, 1232 aa, Klebsiella pneumoniae
MKLLDKKYYNLEPKYEYLKDSFILGLAWKKTDSFVRTHNWYADILELDKCAFDISDEVTNWSNEISKNALSKSDIELIPAPKGASWFINQGKWTTNKDNRKIRPLANISIRDQSFATAVTMCLADAIETRQKDCSLSNLGYAEHVKNKVVSYGNRLVCDWDNERARFRWGGSEYYRKFSSDYRSFLQRPIYIGRETVNKVSGIDDVYIISLDLKNFFGSIKINLLLEKIKKISADHYAAKFINDNEFWTLANRILSWDWPEESLSLLESLDIKEKNVGLPQGLASAGALANAYLIEFDESLISKLRTKIEDSQIILHDYCRYVDDIRLVISGEALESNKIKESIHALVQGILDETLAQNPSDNEPYLKINDSKTYILELSDIDNGSGLTNRINEIQHEVGASSIPERNGLDNNIPALQQLLLTEQDNFSEDVDSLFPGFKNDKSIKVESVRRFSAHRLEKSLAKKSKLISPEERKQFDNETSLIAKKLLKAWLKDPSIMVIFRKAIAINPNLDAYSTILEIIFSRIQRNRDKRDKYIMLYLLSDIFRSVIDVYRNLESEYVDDYQKLMGEVTLFAQKILSCKSFIPNYAYQQALFYLAVINKPFIASNKASFDLARLQCVLIKQHLEPLNSSDGYLFEVSAQISKDYRANAAFLLSHTNSNKVVDLIIEKFAFRGGEFWNAIWKEIVRMQDKDRINEFRWAISKYESKPNSSEHYLSSVISFKENPFRYEHALLKLGVALVELFDDTEKNVWQPDGKQYSPHEIKVKLEGNSTSWGELWRPNFSISCSIDKKGEPGKDPRYISPEWLANYPQTQNDEQKIYWVCSVLRSAALGNVDYTQRNDLKLDKAKYDGIHSQFYKRRMGMLHTPESIVGSYGTITDWFASFLQHGLQWPGFSSSYISQEDILSITNIIEFKNCLLERLGYLNKQICISSNVPTLPTVVNRPELASNHFRIVTVQQLFPKDTNFHPSDVTLANPDVRWKHREHLAEICKLTEQTLNAKLKTESREHTSTADLIVFSELAVHPEDEDIVRALAFRTKAIIFSGFVFCEQDGRIVNKARWIIPDSSESGTQWRVRDQGKHHMTSDEVALGIQGYRPSQHIISIEGHPEGPFKLTGAICYDATDIKLAADLRDLTDMFVIAAYNKDVDTFDNMASALQWHMYQHIVITNTGEYGGSTMQAPYKEKYHKLISHAHGTGQIAISTADIDLAAFRRKLQIYKKTKTQPAGYNRKH

SEQ ID NO: 170 - protein, 144 aa, Klebsiella pneumoniae
MDTLVKLATIISPLISAGVAIWAILVAKKTISESKEIAKKTIADTAYQAYLQLAMENPQFSKGYSADCRQERDPMYDQYVWYVARMIFCFEKIIEVEVNLKDSSWANTLEKHLKFHSEHFKKTNVVEEALYIPPILDLIRCAAN

SEQ ID NO: 171 - protein, 398 aa, Escherichia coli
MLNQSFSVSNLIKLLKKTDPKRYKIGRNSAEYKKYIADKVNGSIETYSFGSISNSRINNKNVYIFKDFMDVLVARKINDNIKRVYSVKQNNRHDIIKKVNTVLSEPVNYYIYRLDIKSFYESIDKNIVFQRINNNPIISHNTKKFINGLFKHNAFSANNGLPRGMGLSATLSEIFMEEFDAELARLPEVFYASRYVDDIIVFSFYKIPDYKNYFSRILPNGLHLNERKCSEYTIEDTSTKHSEIEFLGYSFIIHHGLKNQRRHVVIRISEEKIKKIKRRIALAVKDYSNNSDAELLKKRIKYLTGNILVNSNSNKTDALYSGIYYNYQHLTDKTQLKELDIFKNRMLFSSKGEVGRKILAAGHNLLTAPKKYSFLAGFEKRLLSSFKREDIIKINKVW

SEQ ID NO: 172 - protein, 667 aa, Escherichia coli
MKIKISKSDYKRVLLTDILPYEVPILFSNEGFYKLISENKVLPGTFSEGLKLDSYTIPYSYKIKKGLASSRSLGIIHPSTQLRICDFYDKYEHLMVHMCTKSPFSLRYPSKIGSYYYEKDFLKSRINLKDGLVQFHNHGFDSQETSSSSHFSYKKYPFIYKFYESYEFHRLERKFRKLLKLDIAKCFSHIYTHSVSWAVKSKEFSKVNRTYNSFEGCLDKLFQDANYGETNGIIIGPEFSRIFAEIILQRVDLNVESHLNLEPGIVKDKSYAIRRYVDDYFIFADDDETFKLIEFVLANELEKYKLYLNESKKEFIERPFVTGATMAKNDIAEIIEDLYGSLIHTEKLDELTAMVNLNPDVKIQPENMNDLFPLKGVWNKKLHADKFIKRIKIAVRKNNTTFDLVSSYLLSAIKSKFFKVIRLLRMFDLSGKEDITYKFFSIFNEVIFFIYAMDFRVRQTYIISQVILEINSFANKQASDISEVIKKNTFDELLMCMKSMGNIHERPVELSNLLICMKGLGEQYKLNPDEFKDLLGISENECFYDLEYFSICSMLHYIGDDVLYLKMKEDIVLAIQSLISGRNDIKKDTETFMLFLDMMTCPYLTVKHKRIIYRTYVEANTGQKRFTNAVIDSEIDSLKNNVIFFNWSGDADLEHVLYKKELRTAYE

SEQ ID NO: 173 - protein, 851 aa, Citrobacter rodentium
MTSEIVLNLDFPEYKDDFCTDSIDEQDNELWQQQANKKLLSFLEVMGEEARRYKENNSRSTHPHYKTLSSYHHAIFISGARGAGKTVFMRNARFSWQKHYNKDLKRPKLYFIDVIDPTLLNIDDRFSEVIIASIYATVEKRMKQPDIAQNIKDNFINSLKTLSGALGKSKDYDEYRGIDRIQKYRSGIHLEKYFHQFLISSVELLDCDALVLPIDDVDMKIDNAFGVLDDIRCLLSCPLVLPLVSGDNDLYRFIAKSKFEELLNRKANSNYAKEGSEIAERLSEAYITKVFPSHVKIPLQPIDELLPYLYIHSNEDENKQHTSYSEFIKLVQQKFYFLCNGQERSTNWPQPRSAREVTQLIRSLPPSTLSKEDDSGTDLWQRFAVWAEERRDGLALTNVESYLFIKNAKAVEDLNLSNLIAFNPLLQKGKYPWAEKDFYKQQSQRRKELNAPETNSGILNTVFSEQRKDFILRSMPALELIMEPMYVTKTVAEKNDNSALIAIYTHSDYYSQQQNRRCHIFFGRAFEIMFWSVLAKTENLPQEFYEKDKFKSLFGNIFKKVPFYSIFSMNPTKVVDEENDDGSEPDFSQKLDDSINELVEDIYIWATSNKLRAFKNKNLIPLMTCVFNKVFSQINVLRKNVQDRVKFRDEHLSDLAKRFEYMFINAIFTFIREGVVVNTNVATGAAPARVRNLSEFNRYDKTLSRNMSGILSVKEDNGLTIVKESEGDIADLLFEIWHSPLFKLTTRTCYPIGKINSQNTAQENLSSDFNSFFENGINFELIKQYYWQTSNHDNIRTADVREWATSRLNEAIILFSWMKESKSIKAKIDGQSYEGRLFRGLQQALEGYEEV

SEQ ID NO: 174 - protein, 856 aa, Citrobacter rodentium
MFNQDPYWLIPTLCLASDRIFYAQLRDHLGQKSSGERKKEKNGYILVQAAQDYQFYFGGRIRKEDVQNNALMWQIETGNENCLSMLDSLSAYFLTWRGNCFEVRRERLEPWLMICSVIDPAWIIAYAYQQLIKQNVVCDSELISLLTEHQCPFAFPKGRGDISFADNHVHLNGHGYSSISMLNFIDGNYKVKKGIKWPYRQEYTLFESGLLDKNDLPRWLSAYSSCLLKNVYNSFQQGKRSEVDFTCLKDAVETVLADEDKYYFLEVASLYDVVTLQQRVLYEAAQQKYHSHQRWLLYTCGIMLGTESEDYANALANLIRISNILRNYMVVSAVGLGQFIDFFGFNYRRITKPADTNNRVHYDSSAGISREYRVSPDFVLGSGVMPDIYARQLFDFYCTQARKGVPEQGHIVVHFTRSFPDKKSTYDKLLTECRERLRSQCDYFGRFLTSLTLQSIEYKNLSTDEDRSIDIRKLVRGYDVAGNENELQIEVFAPVLRVLRAAKFKGEGVNFKRLQRPFITVHAGEDYCHILSGLRAMDEAVEFCMLGEGDRIGHGLALGVDIKLWANRQKRAYLTVGQHLDNLVWAYHQAVLLSQHIVEHIPVMHELRDKIHYWSHQLYSETYTPDLLFKAWLLRRNWPDYKSIISDPANINEWVPDQHILVSTDETTAKARKIWERYLNSGLAENDVFNRIISVNCAPDTAQNFSMTFNENEDILSKGELLLYEAIQDFLIEKYSRLGLVIEACPTSNIYIGRLEKYHEHPLFRWNPPDSQWIKPGGKFNRFGLRTGPLSVCINTDDSALMPTTIENEHRLMRDCAIHFYGIGTWMADLWINSIRIKGIEIFKGNHLSQDLDNLI

SEQ ID NO: 175 - protein, 1273 aa, Escherichia coli
MIMSTPWLTPIVADSDHAEANAVSYEALTPTELDSDKAGCYISALNYAYEHPDIRNIAVTGPYGAGKSSVLKTWCKAHNGTLRVLTVSLADFDMQRHVDESNGDSSSDEGTKNTGSVEKSIEYSILQQILYKNKKHELPCSRIDRISDVTAGQILRSASFLTGTILLSGAALFFLAPDYVTTKLSLPGAFARYLLECPFGVRVSGAVASVMGSLCLLLNQLHRIGIFDRKVSLDKVDLLKGAVTTRASSPSLLNVYIDEIVYFFDSTKYDVVIFEDLDRFNNGRIFVKLREINQIINNCLSDRKPVKFIYAVRDGIFNSAESRTKFFDFVMPVIPVMDNQNAYEHFVKKFKEEEINNNLSECISRIATFIPNMRVMHNITNEFRLYQNLVNSRENLAKLLAMIAYKNLCAEDYHGIDSKKGVLYHFIQSYLDHEIQNELLHSANNELEDMAQSLVAITNEKLANRENLREELLMPYLSKNYSGALVFYTEGRQISLDDLIQDEDEFLMLLDKENIQVVTPYNRQNFLMINQRDTEKLKQQYEKRCHLIETKSVDNITRVKNNISSLESLRTEILSGTVADIAEKMTNEGFVAWIKKKEDTGVLTIQSEHEQIDFIFFLLSSGYLSTDYMSYRSIFIPGGLSETDNLFLKDVMSGKGPEKTFSFHLDNVNNIVERLKKLGVLQRDNAQHPAVIRWLIDNDPDTLKNNIMALLSQTGSQRVVSLLMLMQNDFTTYVRLRYLEIFMSDEHILNRLLAHLCASEERTPEQKFFVQEIAAHLLCLTEKSNIWQSVEINKRIGELIDSSPILITAVPKGYGDAFFEVLKDNTLSVSYIPGDVGDEKCSVIRKIAGAGLFKYSVSNLKNVYLCLTQDKNEERMSFSLYPFHCLESLAISELTEILWTNIEDFILSVFIESEEIDRIPELLNSSEVSMTVVEQIIAKMDFCINNLDDIINRSECADNNASGRNIYSMLLQHDRIFPSFDNIIHLLHDTSINTSGELVQWVNEKHFEFEPSDIVINDTGIFNNFISELICSPVISEEALLKVLSNLNVVIIDVPENIPLRNAELLCSEKKLAPTVNVFTVLFNALSENVDDINRMNTLLGNLIAQRPEIITQEPEDIFYIEGDFDEELASELFRHKLIGMNIKVAALRWLRDNKPGILDKSYLLSLDILAELSPWMGDDDLRLTLLKRCLVAGDAGKDALCVVLNSFADESYHGLLPHDRFRKIPHSVDLWEVAELISNLGFIQPPKMGSGRDEHKIVITPVRYVRDVEFYD

SEQ ID NO: 176 - protein, 643 aa, Escherichia coli
MFLNDQETSTDLLYYTAIASTVVRLVDETSDAPITIGVHGDWGAGKSSVLKMLEAACEKKDKTHCIWFNGWTFEGFEDAKTVIIETIVEDLVASRPMSTKVAEAAKKVLRRIDWLKMAKKAGGLAFTAFTGIPTFDQIKGMYELASDFLSAPQDKLSAADFKAFAEKAGGFIKEADTDSNTLPKHIHAFREEFRALLDAAEIEKLVVIVDDLDRCLPKTAIETLEAIRLFLFVEKTAFVIGADEAMIEYAVKDHFPDLPQSTGPVSYARNYLEKLIQVPFRIPALGTAETRIYTTLLLAENALGSEDDNFKALLNKAREEMKRPWISRGLDREAVMAALNGKIPEVVENALLFSLHVTPMLSSGTHGNPRQIKRFLNSMMLRQAIADERGFGSDIKRPVLAKIMLAERFYPSVYGKLVQLVSNHPEGKPEALAEFEALVRGGKTAPKSRADSKENSSESEDVQNWLKIDWAIGWAKAEPALSGEDLRPYVFVTRDKHSTLSNLVVSSHLIPIMEKLLGPKIGMVKIKGDLEKLSPPDADELFEMLSDKLFQEDSFNRKPRGFDGLEYLVETQPHLQRRLIDFARRIPVKKAGGWLATRIAQSLVDPTLIEEYTKLIQEWASQDENLSLSKSAKATLQLSGYQH

SEQ ID NO: 177 - protein, 274 aa, Escherichia coli [sequence omitted]

SEQ ID NO: 178 - protein, 457 aa, Escherichia coli
MSHHTLVARLGTDDNSDLQLSRQSTHLTEINFLKENGKLDFGLGQALNGLSDLGLTPMDVSVDLALLAATVTAADTRISRGHNAQDLWTREIALYIPVASPTLWNSQTGLLSRMLNFLTGDRWTIHFRSRPVIEHGLIQRSSKERSVNPTSVCLFSGGLDSFIGAIDLLSNGGTPLLISHYWDTTTSVYQQKCAQLLSERYGQSFSHVRARVGFEKTTIEGEDGENTLRGRSFMFFSLATMAADALGGPVTINVPENGLISLNVPLDPLRVGALSTRTTHPFYMARFNELLGNLGISAHLENPYAYKTKGEMAIHCHDHAFLRQHAADTMSCSSPQSTRWNPALNEQQSTHCGRCVPCLIRRASLFTAFGTDDTIYRIPDLRSRVLDSSKPEGEHVRAFQFALARLARSPSRAKFDIHKPGPLSDYPDCLAEYEGVYLRGMKEVERLLSGVITRPLT

SEQ ID NO: 179 - protein, 263 aa, Escherichia coli
MKLAGQKPAPQWVDFHCHLDLYPNHSALIRECDISRVATLAVTTTPKAWMRNRELTSDSPYVRVALGLHPQLIAEREHEIALLEHYLPSARYVGEIGLDASPRFYRSFEAQERIFSRILNACFEQGDKILSIHSVRAAAKVLGHLENTRLTENCKAVLHWFTGSISEARRAVELGCYFSINEEMLRSPKHRKLVSFLPFERILTETDGPFVFHEEKAIHPRDVQRTVHEIAQIHHVSDTDAAMRILYNLRSLVTNSSHSENSS

SEQ ID NO: 180 - protein, 1911 aa, Escherichia coli
MSTVDTSTAEELNQGGSDFILTSLEAMRKKLLDLTSRNRLLNFPITQKGSSLRIVDELPEQLYETLCSEIPMEFAPVPDPTRAQLLEHGYLKVGPDGKDIQLRAHPSAKDWAHVLGIRTDFDLPDSHKTVVSDSDRELLEKAHQFILQYAQGQNGKLTGIRSEYVNQGIALSALKEACCLAGYEGLEDFERQAKAGNEISISSSNPSHDDNRIQALLYPNELEACLRAIYGKAQTALEESGANILYLALGFLEWYESDSSEKARYAPLFTIPVRCERGKLDPKDGLYKFQLYYTGEDILPNLSLKEKLQADFGLALPLFNEEETPESYFASVKKVVEQHKPKWSVKRYGALSLLNFGKMMMYLDLDPARWPCDKRNILSHEVIRRFFTSQSCGQENSGLPGGFGQHEYCIDSYPDIHDKVPLIDDADSSQHSALIDAIRGQNLVIEGPPGSGKSQTITNLIAAALLNGKKVLFVAEKMAALEVVKRRLDRAGLGQFCLELHSHKTHKRKVLDDINARLVSQATMPTMEEIDAQILRYEDLKQQLNEYAALINNQWAQTGKTIHQILSGATRYRHKLDIDATALHIENLSGKQLDKVTQLRLRDQIVEFSRIYKEVREQVGANAEIYEHPWSGVNNTQIQLFDSARIVDLLQTWQTSIIDFQHSYQEYVDKWALEGESLNTLQYIEQLVEDQSNLPVLCGSEHFPALSELDSPDAIARVRHYLDRFELLQGHYVALSQVIEPQKLRLLEQGQSCDFPREELEKYGAAEDFTLRDLVRWLESIQSIHDELSSIYAQLNDFKNALPDGIASYIDDSQAGLLFCSELLSILGALPTELIRVRDPLFDDDDIDAVLRDLMCQIETLRPLRDGLSTLYQLDQLPSQEMLAHAVAVIQQGGLFAWFKSDWRSAKALLMAQSRKPDTKFAELKRCSADLLKYSELLQRFEQSDFGNQLGNAFRGLDTDCEQLMLLRDWYKKVRACYGIGFGKRVAIGSGLFNLDGEIIKGVHLIEKSQISSRLMTLVKRVEHEAKLLPRISSLLEEHASWLGEQGVLMQSYRQVRNTLIALQGWFINPDISLEQMTHSSEILQNINDLQISLENDSLQLGAFLQLTPLACGAYKNNQLTLDTINDTLNFAEQLVDKINCVSLATQIRHLASGSDYDLLCRDGGEIVSKWNEQIKNAELYALETKLERSQWLKSTDGSLNTLIERNERAIQQPRWLNGWVNFIRCYEQMHENGLQRIWSAVLAGSLPIEKVELGLALAIHDQLAREVIHIHPELMRVSGSQRNALQKSFKEYDKKLIELQRQRIAAKIACRNIPEGNSGGKKSEYTELALIKNELGKKTRHIPIRQLVNRACNALVAIKPCFMMGPMSAAHYLEPGRMEFDLVVMDEASQVKPEDALGVIARGKQLVVVGDPKQLPPTSFFDRSADGEDDDDAAALSDTDSILDAALPLFPMRRLRWHYRSRHEKLIAYSNRHFYNSDLVIFPSPNAESPEYGIKFTYVSKGRFSNQHNIEEAQAVAEAVLHHAHHRPGESLGVVAMSSKQRDQIERAIDELRRNRPEFNDAIDGLHAMEEPLFVKNLENVQGDERDVIFISFTYGPSEHGGKVYQRFGPINSDVGWRRLNVLFTRSKKRMHVFSSMRSEDVLTSETSKLGVISLKGFLQFAESGKLDSLTTHTGRAPDSDFEVAVMEALNHAGFECEPQVGVAGFFIDLAVKDPGCPGRYLMGIECDGAAYHSAKSARDRDRLRQEVLERLGWRISRIWSTDWFSNPDEVLSPIIRKLHELKTLAPDVVVPSYEYVETIESSAEVASDSIDSLMPNLGLKEQLKYFATHVIEVELPNVDADRRLLRPAMLEALLEHQPLSRSEFVERIPHYLRQATDVYEAQRFLDRVLALIDGAEAEANDAAFESELA

SEQ ID NO: 181 - protein, 2511 aa, Vibrio harveyi
MAGASIDAIGVINQIKDNLTDRYEDGFPVLKEIIQNADDAGANELTIGWSKGFCNAENELLNAPALFFINDAPLAEEHRDAILSIAQSSKATSKASVGKFGLGMKSLFHMGEAFFFMSDQWRIEHWASDVFNPWDKYRDAWNEFGENDKCQIATKLKGFLSTDKPWFVVWVPLRTKALAKAHNNYIIINNFSGDEKLPSFFNQAHLSEKTSEILPQLKNLKDIGFFCESDKGVFDEVTSIQLHEDSSRSSFCGEPRLNNGDSFAVFSGKIYSNSNEERCALDYAGCERVIFDERLNQLKDENMGWPKSYQFDKKANLPVEALDKAEQHASVTFSRFKTKGQAYLKANWAVFLPLSQTKELVAVPIEGEYDYNLYLHGYFFVDAGRKGLHGHDNLGFSTSLEHVKNDEKKLREVWNIILASEGTFNLVLPALNEFCQKLRLPHQIKTVLTKALYDLLIERYRKEVSKSANWIINIDDKGAAWSLLDKNAQCLPIPRPENSDYSRIWSTLPGLSKLLDKKSLYEATGNEFLTEQNQRDSWNITLLEEALGSGVVNAFYRSINIEYLLQFLQLAKEQCTTEDFDNLIIPQFREVLSTHKLAELSLNKALNTQVFELVSAPKTVVLPIDKDDQSIWELVCKIIPAKLLLPKFLSTHNKPIHDNVTEEELFALLTLVDSYIKKQGERLSSDESSACERLITFVIDCVNASEVIQKSDFYQKSGHLKLLKVEALGSQQSTKYRSLNELIVLKEKYQLFLRGGERNFGKGLGKELVAVVPGLELCFISKDFEIGGLYEGLTACSEAACLRLLSTYPNLGSNSARLALTKVFSAELSTDEEKRGFRYLIHGSKEDDLRQTLWKPNRATNPVWMKIWRMCQPEDFPGWCELDEEFSNALTNQYEHFIGVKEQFYKDIISEYRTILPECNFDNFDDWEVEQLLADIGSQGDERLWKALPVHRTAHNTRVAITTKCLMEGSATVPSEWDVHLIQHSAIAEVAACQHKWVNHGLPKELIEIALTQSSPAQYSAFILDQLCAIRIANEGIEHELEGKINNTKWLRLASGTEVSPEAILSFSANELPESAKFCELKESNIYMFSQLDGNMFEHDQARGFLREWVAKSNSSVCSCILAEAAQHQSYVVGNFSNISAQVLEQISCIPPLMQLSAGWGLLVELYQSQYLSVNENKQVMLCKETEPQSLWWALERIADDDIHGQSKELRKAFLEALCNTEGGVDYLPKLRFRNENGSYVSGNTLVSNVAQVVADNLISPQEYAVIESYCSKSALTNGNTSKIIELAGDNAPVLSDYFDDWEGMVPPDAIATFIALFAKSGGVEKLVNNYLRQSTLESIKQGYEEKWNSGKGRRGEFSHYPYSSLYKSVDFELAICAENAAYMTSIFGERIQVKLQKTPDSLLVHQANKSKTKRIELRRVDTKNVSKDQLLRMLAKAVETIFTDVFGAECIRFESEFLKRFGASEQVDIQITRQIVLENVVPLLERLQVREEGLCDLRSDYKREQRVLASSDPSVLQDRSRLNSVLTKIKETLENNEKVQSLVLESVRKEMSKHFQYSPFSVPFELFQNADDALCELIEMQGDSTNVLTRFDVVSGSDGTLNFYHWGREVNYCKSSYVAGKNQFDRDLEKMVSLNVSDKSDGKTGKFGLGFKSSLLLTDIPRLVSGDICAEIHAGVLPSVPSKPVMTELNQNVDEYKIGNRKPTLIQLPKCDKKRADLKLVLGRFKSNAGILTVFSRQIREINIDEQRFGWSGQALHNIPEVLVGEVKLPTNTSEESNVILRSNRVLIINTESGQFLFALDSNGVVSLSNRKNLSSFWVLNPIDEDLKLGFCINAPFAVDIGRSQLAVDNGDNIDLSSSLGKALSAVLVKMFAASSNNWNEFAEEVGLGQSSTFIKFWASLWDVITAHWPARLGETNSKAELIKQMFTVEDGLLAFYQRCAALPRNLGVKEDSLVQLKNVDTGANKPLTKAFNTLGNHPILQRLYKDQQLVGHDTFEFLKSIDFRPNNGALTKLELIDLIGQDFPHNEVNHDRASFYGRLFGKNFEKLMSNFEMTVTEKKVLEERFSELKFLNKTGVYVTASKLIVEGSPERDLLSKFAPDSAKLSEKYDQASMDLVSFIRRDVSYDIHSWAKQIRSEESNRGGKQEGLCSFLVEGGYLASSLLRKLQTDHPAFLTKGRFDPSVLTEKWRWSSSKASAFISIWIDTEEDKARHVRQAQKEFIPNVTNGEQILENITNWWNQCRNQSLIDYDKQLYAQPMPWKAMTEDFELETLEVRKGWLKLFYLGSCQTLGFNNDVANRNVVSWFEDKGWWDKLAVANGPSPEVWKELMEEYLQTARVDERYRVWIQVLPLYRFATKLKDYVALFMNASFIDNLDDLLKPNSSNKLSGSGIQVSELKGTLGIGINFILRELQRHQVLEREYCEDIQKYAFVLPARLRKLLKKMGAGLSFDAEPENSERAYDYFVSALNSETHPLLKDFDIPFRVLLADKQAFERCFNFALDEQFEEVYG

SEQ ID NO: 182 - protein, 893 aa, Vibrio harveyi
MDNIIRVIHPKFGVGTVEFEKAETSLVRFEHGFEECLKSELEAVADLKSDLVSGQSVAASELALKTLAHSLKSVNENWSVFSKSNINLLPHQLWVCHRVLRQWPTNQLIADDVGLGKTIEAGLILWPLIERKRVKRLLILTPAPLVEQWHQRMLDMFDIRLSMYAPENDTSRVNYWDSNNMVVASLPTLRNDKNGRLERMLNAEPWDMLIVDEAHHLNSTEDKGGTLGFRFIQTLIENDKFESKLFFTATPHRGKEHGFFSLLQLLRPDLFNVKQMDEREMRPFVKDVLIRNNKQFVTDMNGERLFKPLSVSSRTYSYSEQEQHFYDLLTKFIVSGQAYASSLNSRDQRAVMLVLTAMQKLASSSIAAIERALKGRIEKHKLGKQRLQDIEVQQAALLEKREESESQSESEIYSDELAQLELEFIETTTRVQLMDDELPRIMELLSACQKVGSETRILTILDILETEFKDRTVVFFTEYKATQALLMGALNKKYGEGCVTFINGENRLLNVENGSGVCVDYVTDRYNAAKRFNEGKVRFIISTEAGGEGIDLQQNCFSMIHVDLPWNPMRLHQRVGRLNRYGQVKNVEVITLRNPDTVESRIWDLLNTKIDLIMRSVGGAMDEPENLMELILGMADSTLFNELFTEAANRKNSESLSAWFDHKTKTFGGESVVQKVKDLIGRAEKFDYQDLEAVPRLDLGDLKPFFTQMLSFNQRRCKYDENGGLSFLTPHAWLGQFGTRRSYEKLHFDRKAKQLDSEADIIGFGHPMFSKAVNQGEQIPGSYAFLNGIEKDLVVFKVQDQVTGTDASVKVSIVGLVLDDNGDCELVKDEDLIGYLNEYLKISNDVDSKRTPEDLVSVIQTANDYLMENVSSIGLPFRLPNSEPLTVFYKASN

SEQ ID NO: 183 - protein, 386 aa, Erwinia piriflorinigrans
MVAIKMYPAKDGDAFLIICDEEKSAFLIDGGYAETFRQHILPDLRELSFNGYRLRLVMATHIDSDHIGGLVDFFLVNGHAAEPAVITVDRVWHNSLRAMTRPENNAQKVDSREITDFLRRRYHVEADKAKPHEISARQGSSLAASLLAGDYHWNEGKGYQCICTGTSIPNLMCDNSLTILSPSKERISALCLWWRRQLASLGFSGRSSSSEAFDDAFEFFCKREASQVPLPHVINARTPLLERDYARDTSPTNGSSIAFSLVLNKKRILMLGDAWAEEVVTSLGASGASHHFDIIKISHHGSIRNTSPNLLKIIDAPVYLISTDGKKHARHPNLAVLKAIVDRPAAFTRTLYFNYANSASAFMKNYLSASGAQFRIIEGSTDWITL

SEQ ID NO: 184 - protein, 1935 aa, Erwinia piriflorinigrans
MRYAATETEIRNATVLIECAGYTGSGTLIAADKVLTAAHCVVSDDPETPITVTFFGADEDVCVNATISEIDTSCDACLLTLSDSVDIPPITLMTQPEREGSQWKAFGYPASRNGPSHYLHGTISQILPRLFHGVDMDLSVSADCVLEEYSGVSGAAILSENKCIAMVRIRMDGGLGAVSLDKLSGLLIRNGLIPDDIASLPDSSLSGEVVLNRTEFRDNFESFVLEHKGRAVLLEGSPGSGKTTFCRHYQPRSEQLAVAGVYEFTPEDGAGTTFKILPEVFADWLHNQVSILLSGRPARREETEKINLTQKVSDLLHTFSDYWKHKGKYGVIFIDAVNEASECGDEAVSRFTALLPVTLPENVKLVFTAPSLSSAGKAFRHWLTPQDCISLTLLSHREVLQLTARELKTSAPSLSLLTRVSDIAQGHPLYLRYILGYLKANPDQVNLEIFPVFSGSIETYYERLWQGLVKDESAVNLLGILSRMRWGIDISSLIPVLTPQEQTVFVPTLDRIQHLLLNDKSSALCHQSFAAFINSKTAVINSLLHGRLADFCLTSGESYGLINRAYHLLLASHDRHPEAALVCTQEWADACIVKGAQPDILIHDIRQTLKNTLIRADAVASIRLLLLFQRMTFRHHFLFLQSAYHSGLALAALGRPDEALEQLIPSGSLVVDAVDAIVSAQTLARMGNSEHALKLLEKVKSAVDQEFERNPVNLSDFIGLSLAWVRAELMAGVVDGHGRTREVVEYLYGCGQVVRDNFEQSAHSKSAYTRAFYPLQAEMEAVNIAFNDRSVSLRTVKEKFGSLPENILDLMLSSVMRAHDIILQHQLPMPQHALQPVWYNLDRLLHTDIPYSNEIRFNSLSSLIFFNAPSALIIRMAGVFSFEVVPEITLLNEENEIAADSIDVSEQGQLWLVSAYLNETQPCPDIKHPSQGCSEWLKTLTEAIFWYSGQARRAVIDGNDEKKELLLVKVQNDILPALSYSLEERMAWPNSWAMPEQIIPMIYEELVNMFGACWPDKISVITDFILAHTPQQCGLYSEGYRRLLNRVIQTLLNEHRFLGQSDTTFQLLETLHAFVSAFTENRQELVPELLNIIPAYISLDAPQLAQDTYTELLGVSMGPDWYKEDQFALMTTMLRVIPQHTDTNTTLSQVAGFLEHASGEMTFRRYVRQEKSQFIGELIRRGNYAHGFNYYRQQSCGSHEEMLTQLSHPAADSPHPLKGMRFPGGALDEEHAVECIVSELRNRVDWRLRWGLLEIFSFGSIGNLAVPFAELINEFSADTEDLNEIPKRLHNILHGDVPFSEHRNFIKNFTEHLADNHKPLFAEFISLLSEDTSDNDVKPPPSGDANQKGTDTSDDVAMQPGLFGKRSAINRAEACMENARKAAARRNTVRASELAVESLHIIQDGDWSVWRKNNHLAELTRTYILDNSADAGSVIRAYASLVEKERYAPAWVIASHLIEIAASKFSDQEAQAINQIVLEHNRHMLGNTEADAAHFSFLNEPDTSDAGEETLYFLFWLLEHPLKFRRERALEVLKWLASDDDKILGQCVTEALVSDIASRAEALMALTDWVSARSPQRIWDFIVKERSLFEWLEGTTALSQVHLLERVTSRAGFVLRNEIAAFERPRKLLLTSEASGQRNIPENLPTWVQSLSQTLAVMEKQGIDIPALLTLLEKRVLQQSGLADITVAFELEKLLARGFTVNRTPSHHRWETMVRFALNQIIHEAAAQDELQNIEPLLRAWNPASEECVEPWEVCNRAKQIICAVMEGRHQQASGIEDGFFLHYLDEVEVSREGQTHLVEISAVLTTAHNGHESLRPGAESEFNATQTPDIERTLSVHLTCQRVKMQPLLFGGATPAAVSKKFMQMTGTLPSDFIRRQWRSGRSLSKNRWGEPISRGSLLLMKRTTTLPPGLGLAWYVTVDGKLMNIFSYAPRRR

SEQ ID NO: 185 - protein, 93 aa, Erwinia piriflorinigrans
MKYSSMETPKTREEFEARCFHLLNAIKLGRYHGIPGEGNKEQVPFLPNGRVDLANIDTMTRLSMNSLYDFHYNRDNYPQFDLSENDENEEATD

SEQ ID NO: 186 - protein, 2092 aa, Salmonella enterica
MSDSLLVRTSRDGDQFHYLWAARRALRLLEPQSTLVALTIEGASTTEMGSQPVVEDGEELIDIAEYYGSNELATATTVRYMQLKHSTMHSDTPFPPSGLQKTIEGFATRYKALIQKIPVETLRTKLEFWFVTNRPVSSSFSEAINDAANQHVTRHPHDLAKLEKFTGLQGAELSIFCQLLHIEGQQDDLWSQRNILLRESAGYLPDLDTEAPLKLKELVNRKALTESAANPSITRMDVLRALGVDETDLFPAPCRIERIENSVSRTQEATLVQRVVEAFGAPVIIHADAGVGKSIFSTHIEEHLPTGSVSILYDCFGLGQYRNASSYRHHHRTALVQMANEMASRGLCHPLIPNAGTGISQYMRAFLHRLSQSISILRASEPLAVLCIIIDAADNAQMAAEEIGETRSFIKDLIREKLPDGVCLVALCRPYRRELLDPPPEALTLSLQTFNRDETAAHLHQKFPDASESDVDEFHRLSSCNPRVQALSLSQNLPLNDTLRLLGPNPKTVEDTIGEVLEKSIARLRDTAGISERAQIDTICSALAILRPLIPLSVLSAISGVAGSAIKSFALDLGRPLIVSGETIQFFDEPAETWFQRRFRPSAADLHQFITKLRPLTKDSSYAASVLPALMLEGNQLSELIELAISSQALPETSAVERRDIELQRLQFALKAALRTGRYQDAAKLALKAGGECAGDNRQRVLLRDNIDLAAKFVGSNGVQELVSRNAFPDTGWPGSRNAYYAAILSEYPELSGEARSRLRLTMEWLTNWSQLPDDERSRQNVTDQDRAVMLIACLNIHGAEAAARELRRWRPRKLSFDAGKIVAMQLLAHARYDELDQLAIAAGNDISLVMGIVLEARKLHRPVAEQAIRRTWRLLKSQRVSIKDRNHANNQTIAAITGMVEMALIQSVCTESESIQLLDRYLPKVPPYALTSEYSKERVAYVRAYALQANLMGSQLALSDLASTEVKKELMAEKRHGESDDLRQLKQYSGVLIPWYNLWAKVILGKTRKADLESELSDTQKESTAIKGHSYSEHSLSSNEIANVWFDILIEAGNVSKDDVENIIKWSQHKGNRVFTPTLHRFSSVCAEISGLGELSYHFAELALSLWRDEHSDAQIKADGYIDLSRSLISLDEPEAKEYFNQAIEVTNKLGDENLSRWEAILDLAEYVAGKTQVPPEISYKLARCAELTREYVDRDKHFAWSDTVEILAELCPSSALAIISRWRDRTFGNHRSILAWTIEHLVKKNKINALDALPLITFENDWHKCDLLDSVLSSCTDDKDKIMAFEVVYHYTKFNVQNIQNLKKLDAISTSLGIEHTELKERISGLQHTETVSKKSSLSSNDNEQGHDQEWESIFKDCDLSSIDGISAAYEKFRNVPEFYSKETFIKKAISRVKTGKECSFITAIGAIFHWGLYDFKYILESIPDEWTSRLSIKTTLAGLIKEYCQRFCMRIRKSRVYEIFPFSLASRLSGISEKEIFGITLEAIAESPEPANSDRLFSLPGLLVSKLESNEALDVLSYALDLFDEVLKDEDGDGPWNEKLSPPTHVEDSLAGYIWARLGSPEAEMRWQAAHAVLALCRMSRTCVIQGIFQHAINATTLPFCDRNLPFYTLHAQLWLMIAAARVALDDGKSLIPNIGYFYHYATTDQPHVLIRHFAARTLLALHDSDLISIPAQEENKLRNINQSTTLPVLDKVEDHRGEDSYTFGIDFGPYWLKPLGRCFGVSQKQLEPEMLRIIRDVLGFKGSRNWDEDERNKRRYYQDRDNHHSHGSYPRVDDYHFYLSYHAMFMTAGQLLATKPLVGSDYDDVEDVFQDWLRRHDISRNDHRWLADRRDIPPKERSSWLNSSSDNRDEWLASISENVFNETLCPSPGLLTLWGRWSDVCSDRKESIIVHSALVSPERSLSLLRALQTTKNVYDYKIPDAGDNLEIDHAHYQLKGWIKDIAEYCGIDEFDPWAGNVRFPIPEPASFIIDAMKLTTDKDHRVWYSPSDVEPAMISSIWGHLSGKNDEEKSHGYRLCASIHFIKSALETFNMDLILEVDVDRYSRNSRYERNNENELDNIPSSTRLFLFRHDGTIHTLYGNYRNGEKTS

SEQ ID NO: 187 - protein, 207 aa, Salmonella enterica
MAHHIAELIYDAEHCTDDIVRTAKQAEIRDSIWSFWSNRYELPIGSRPFQELEPILRTLKGLDPENEQPRFFSPYRDLINVEKETSEVQKWLTAAKDIDSAAKILIDYCLSLAAENAIDKSQEWVELAQKAGLNKDVDLLEIRIFQLRGTPANTDNPNNAQRRILEKRQKRLEAFLLLGSQLNEQLKSQLEALPAIEDEPTDDDEDF

SEQ ID NO: 188 - protein, 1484 aa, Escherichia coli
MEPISITVATYVATKLIDQFISQEGYGCIKKALFPQKRYVDRLYQLIEETAIEFEETYPVESGAIPFYHSEPLFEMLNEHIFFKEFPDKEILLDKFKEYPSITPPTQQQLSLFYEMLSLKINNCSKLKKLHIEETYKEKIFDINEELIQVKLILRSIDEKLTFHLSDDWLNEKNSQAIADLGGRYTPELNVKLEIAEIFDGLGRTNDFSKIFYSHIDSFLVAGKKLHSCDVISSELFEINQSLKEISDIYQEINFSKLDEIPINKFNNYVSSCQTAIGGAVSILWELREKSEQVGETKHYSDKYSSTLRMLREFDYACNELRIFINSTTVKLANNPFLLLEGKAGIGKSHLLADVIKNRIASGYPSLLILGQQLTSDESPWSQIFKRLQLKITSREFLEKLNLYGKKTGKRVLVFIDAINEGNGNKFWNDNINSFVDEIRCFEWLGLIMSVRTTYRNVTISHENVVRNNFEIHEHIGFQNVELEAVSLFYDYYNIERPSSPNLNPEFKNPLFLKLLCEGIKKNGLTKVPVGFNGISNIFNFLVEGVNKSLASPKKYAFDPSFPLVKDALNEIIKFKLEIGRNSISLKDAHSVVQSVVNDYVADKTFLSALIDEGLLTKGIVRNDDNSTEEVVYVAFERFDDHLTVNFLLNDVENIESEFKPDGRLKKYFHDECDFYIKSGIVEALSIQLPERYEKELYEFLPEFSNNLKLLEAFIDSLIWRDIKAIDFEKIRPFINEHVFKFKDSFDHFLEAVISISGLVGHPFNANFLHDWLKDYSLANRDSFWTTELKYKYSEDSAFRHLIDWAWARTDKSFVSDESIELVATSLCWFLTSSNRELRDCSTKALVSLLEPRIPVLRKIIDKFYGVNDPYVWERIFAVALGCTLRTDNIKELKYLAETVYQKVFCSKYVYPNILLRDYAREIIEFANHLGLELESIELSKTRPPYNSIWPDKIPSKEELESLYDKEPYRELWSSIMEDGDFSRYTIGTNYNHSDWSGCKFNETPVDRKQVFKTFKCKLTDQQKDLYDATDPFIYDDKCEGIKFGRVVGRKAQEEIKASKKLFKNSLSYDLLSEFENEIEPYLDHNNNLLETDKHFDLRLAQQFIFNRVIELGWDPEKHGNFDQQIGTGRGRREAFQERIGKKYQWIAYYEYMARLADNFTRFEGYGDERKENPYQGPWEPYVRDIDPTILLKETGTKKISNKEMWWLNDEVFDWTCSNEDWVKSSTTITNSYAFIEVKDDNGDEWIVLESHPSWKEPKIIGNDDWGHPRKEVWYQIRSYIVKVEEFENFRCWAIAQDFMGRWMPECTDRYQLFNREYYWSEAFKSFKSDYYGGSDWTSVTDRESGAKIADVSVTSINYLWEEEFDKSKIETLNFLKPSNLIFEKMGLKSGEVEGSFNDENGTMVCFAAEAVYASKPHLLVKKEPFLTMLRDNGFEIVWTLLGEKGVIGGSLISSHHYGRQEFSGAFYYEDSQLTGSHKTSFTR

SEQ ID NO: 189 - protein, 1587 aa, Escherichia coli
MVKPNWDNFKAKFSENPQGNFEWFCYLLFCQEFKMPAGIFRYKNQSGIETNPITKDNEIIGWQSKFYDTKLSDNKADLIEMIEKSKKAYPGLSKIIFYTNQEWGQGRKSHEPEGDKNADNYLETVGNSNDPKIKIEVDQKAYESGIEIVWRVASFFESPFVIVENEKIAKHFFSLNESIFDLLEEKRKHTENVLYEIQTNIEFKDRSIEIDRRHCIELLHENLVQKKIVIVSGEGGVGKTAVIKKIYEAEKQYTPFYVFKASEFKKDSINELFGAHGLDDFSNAHQDELRKVIVVDSAEKLLELTNIDPFKEFLTVLIKDKWQVVFTTRNNYLADLNYAFIDIYKITPGNLVIKNLERGELIELSDNNGFSLPQDVRLLELIKNPFYLSEYLRFYTGESIDYVSFKEKLWNKIIVKNKPSREQCFLATAFQRASEGQFFVSPACDTGILDELVKDGIVGYEAAGYFITHDIYEEWALEKKISVDYIRKANNNEFFEKIGESLPVRRSFRNWISERLLLDDQSIKPFIAEIVCGEGISNFWKDELWVAVLLSDNSSIFFNYFKRYLLSSDQNLLKRLTFLLRLACKDVDYDLLKQLGVSNSDLLSIKYVLTKPKGTGWQSVIQFIYENLDEIGIRNINFILPVIQEWNQRNKVGETTRLSSLIALKYYQWTIDEDVYLSGRDNEKNILHTILHGAAMIKPEMEEVLVKVLKNRWKEHGTPYFDLMTLILTDLDSYPVWASLPEYVLQLADLFWYRPLKETGERYHSMDIEDEFGLFRSHHDYYPESPYQTPIYWLLQSQFKKTIDFILDFTNKTTICFAHSHFAKNEIEEVDVFIEEGKFIKQYICNRLWCSYRGTQVSTYLLSSIHMALEKFFLENFKNADSKVLESWLLFLLRNTKSASISAVVTSIVLAFPEKTFNVAKVLFQTKDFFRFDMNRMVLDRTHKSSLISLRDGFGGTDYRNSLHEEDRIKACDDVHRNTYLENLALHYQIFRSENVTEKDAIERQQVLWDIFDKYYNQLPDEAQETEADKTWRLCLARMDRRKMKITTKEKDEGIEISFNPEIDPKLKQYSEEAIKKNSEHMKYVTLKLWASYKREKDERYKNYGMYEDNPQIALQETKEIIKKLNEEGGEDFRLLNGNIPADVCSVLLLDYFNQLNNEEREYCKDIVLAYSKLPLKEGYNYQVQDGTTSAISALPVIYHNYPMERETIKTILLLTLFNDHSIGMAGGRYSVFPSMVIHKLWLDYFDDMQSLLFGFLILKPKYVILSRKIIHESYRQVDYDIKKININKVFLNNYKHCISNVIDNKISIDDLGSMDKVDLHILNTAFQLIPVDTVNIEHKKLVSLIVKRFSTSLLSSVREDRVDYALRQSFLERFAYFTLHAPVSDIPDYIKPFLDGFNGSEPISELFKKFILVEDRLNTYAKFWKVWDLFFDKVVTLCKDGDRYWYVDKIIKSYLFAESPWKENSNGWHTFKDSNSQFFCDVSRTMGHCPSTLYSLAKSLNNIASCYLNQGITWLSEILSVNKKLWEKKLENDTVYYLECLVRRYINNERERIRRTKQLKQEVLVILDFLVEKGSVVGYMSRENIL

SEQ ID NO: 190 - protein, 769 aa, Escherichia coli [sequence omitted]

SEQ ID NO: 191 - protein, 1275 aa, Escherichia coli
MQFITNGPDIPDELLQAHEEGRVVFFCGAGISYPAGLPGFKGLVELIYQRNGTTLSEIEREVFERGQFDGTLDLLERRLPGQRIAVRRALEKALKPKLRRRGAIDTQAALLRLARSREGALRLVTTNFDRLFHVAAKRTGQAFQAYVAPMLPIPKNSRWDGLVYLHGLLPEKADDTALNRLVVTSGDFGLAYLTERWAARFVSELFRNYVVCFVGYSINDPVLRYMMDALAADRRLGEVTPQVWALGECEPGQEHRKAIEWEAKGVTPILYTVPAGSTDHSVLHQTLHAWADTYRDGIQGKKAIVVKHALARPQDSTRQDDFVGRMLWALSDKSGLPAKRFAELNPAPPLDWLLKAFSDERFKYSDLPRFCVSPHVEIDPKLRFSLVQRPAPYELAPQMSLVSGCVSASKWDDVMSHIARWLVRYLGDPRLIIWIAERGGQIHDRWMFLIESELDRLAALMRERKTSELDEILLHSPLAIPGPPMSTLWRLLLSGRVKSPLQNLDLYRWQNRLKNEGLTTTLRLELRGLLSPKVMLRRPFRYSEDDSSSTDEPLRIKQLVDWELVLTADYVRSTLFDLADESWKSSLPYLLEDFQQLLRDALDLLRELGESDDRHDRSHWDLPSITPHWQNRGFRDWVSLIELLRDSWLAVRAKDSDQASRIAQNWFELPYPTFKRLALFAASQDNCIPPERWVNWLLEDGSWWLWATDTRREVFRLFVLQGRHLTGIAQERLETAILAGPPREMYEDNLEADRWHYLVAHSVWLCLAKLRGAGLVLGESAATRLTEISTAYPKWQLATNERDEFSHWMSGTGDPGFEESIDVDIAPRKWQELVQWLAKPMPERLPFYEDTWSDVCRTRFFHSLYALRKLSQDDVWPVGRWREALQTWAEPGMILRSWRYAAPLVLDMPDAVLQEISHAVTWWMEEASKTILCHEEILLALCRRVLMIETSPESSTIRNGIETYDPVSTAINHPIGHVTQSLITLWFKQNPNDNDLLPVELKTLFTKLCNVQIELFRHGRVLLGSRLIAFFRVDRPWTEQYLLPLFAWSNPVEAKAVWEGFLWSPRLYEPLLIAFKSDFLESANHYSDLGEHRQQFAIFLTYAALGPTEGYTVEEFRTAISALPQEGLEVAAQALYQALEGAGDQREEYWKNRVQPFWQQVWPKSRNLATPRISESLTRMVIAARGEFPAALAVVQDWLQPLEHLSYDVRLLLESDICSRYPADALSLLNAVIAEQHWGPRELGQCLLQIVQAAPQLEQDVRYQRLNEYSRRRSV

SEQ ID NO: 192 - protein, 1207 aa, Cronobacter sakazakii
MTNKNKIKPLLNNISARLWDGRAAILIGAGFSRNAKPLTSKARKFPMWNDLGDIFYESVYCKKNDNRYSNVLKLGDEVQAAFGRATLDKLIMDHVPDKEYEPSKLHVSLLSLPWIDVFTTNYDTLLERASVNVDSRKYDIVLNKNDLMNAERPRIIKLHGSFPSERPFIVTEEDYRKYPLENSPFVNTVQQSLIENTLCLIGFSGDDPNFLNWIGWIRDNLGTENSPKIYLIGLFSFNEAQRKLLEKRNISIVDLSFLGDFGKDHYLAHQRFIQFLYESKNRDNLIEWPIETNYDRIVFNDGIELKTEKIKKCILEWAQSRQSYPNWLILPESNRSNLWQNTIDWLSVANYDVAWDGSDDLDFGYEITWRLNKALLPIFNDTSEFLFKLIEKYEINYVSGINNKIIDFDEKYSHITLSLMRFCRQENLIDKWKNLNDLLIQNLDRLTPEVKSDYYYENILFSYFNLNFDEARNKLSNWETNKLLPHHEIKRAGLLAEFGMLDEAINLLEETLSTIRRNSLLSSRNIDYSSESQEAYGIYILRMFKRSLRLDSKDDDYSSEYNSRLATLSQYRSDPENEIKYLEIKLESLPGTFKNTNDTDFDLNKRTVTTYLGGSPTEVRSLDAFSFFLLAEELGLPFHIPGMNIFSGIVENAARHIYQYSPEWAIFSIFRTFNKDKAKSLFNRNRISSLERKKVEDLFDGYYKKYEQIITKKIEDRLNDKLEIEISTLSIIPEILSRLVTKVSFNKKKDIIHLLLKLFNSDNFHQYMETKDLLKRTISNLSDLQKISLIDIFIDFPSAPPNTQLHMGQRYNFLTPFECLLGVTITPPKENSKKIASAKLKKDINDLKSDNLDLRKAVSQKLITLYNLEMLNKSDTTKLIKNLWSKRDNFGFPIGSGYYKFFFINNLNPDNENIADKFISIIKTYKFPVQEGKRVSITGGLDEYCTELNGALHHISLPEKTLSEIISKIHDWYVKDRAWLEKRDDLAKEFTLRFRNITNIITTILEHHKDKLHAESINEISSLLDKMKEDKIPVNSAVTMLCLKNKSTYLERIKDIENGLYSFNKDDVIEAINSTYVFIRNNEFPLTIIQAISDKIAWDRNPRLPDCYNLIAYIINSCEFTLPDYLIEKILRGLAYQINIDDRDFVDNNEYLNHLEKKLSATKLAASMFRKNETLGIDQPSIIQEWKNMCNSRNEFDEIRNEWNNNI

SEQ ID NO: 193 - protein, 415 aa, Escherichia coli
MSIYQGGNKLNEDDFRSHVYSLCQLDNVGVLLGAGASVGCGGKTMKDVWKSFKQNYPELLGALIDKYLLVSQIDSDNNLVNVELLIDEATKFLSVAKTRRCEDEEEEFRKILSSLYKEVTKAALLTGEQFREKNQGKKDAFKYHKELISKLISNRQPGQSAPAIFTTNYDLALEWAAEDLGIQLFNGFSGLHTRQFYPQNFDLAFRNVNAKGEARFGHYHAYLYKLHGSLTWYQNDSLTVNEVSASQAYDEYINDIINKDDFYRGQHLIYPGANKYSHTIGFVYGEMFRRFGEFISKPQTALFINGFGFGDYHINRIILGALLNPSFHVVIYYPELKEAITKVSKGGGSEAEKAIVTLKNMAFNQVTVVGGGSKAYFNSFVEHLPYPVLFPRDNIVDELVEAIANLSKGEGNVPF

SEQ ID NO: 194 - protein, 610 aa, Escherichia coli
MSLFKLTEISAIGYVVGLEGERIRINLHEGLQGRLASHRKGVSSVTQPGDLIGFDAGNILVVARVTDMAFVEADKAHKANVGTSDLADIPLRQIIAYAIGFVKRELNGYVFISEDWRLPALGSSAVPLTSDFLNIIYSIDKEELPKAVELGVDSRTKTVKIFASVDKLLSRHLAVLGSTGYGKSNFNALLTRKVSEKYPNSRIVIFDINGEYAQAFTGIPNVKHTILGESPNVDSLEKKQQKGELYSEEYYCYKKIPYQALGFAGLIKLLRPSDKTQLPALRNALSAINRTHFKSRNIYLEKDDGETFLLYDDCRDTNQSKLAEWLDLLRRRRLKRTNVWPPFKSLATLVAEFGCVAADRSNGSKRDAFGFSNVLPLVKIIQQLAEDIRFKSIVNLNGGGELADGGTHWDKAMSDEVDYFFGKEKGQENDWNVHIVNMKNLAQDHAPMLLSALLEMFAEILFRRGQERSYPTVLLLEEAHHYLRDPYAEIDSQIKAYERLAKEGRKFKCSLIVSTQRPSELSPTVLAMCSNWFSLRLTNERDLQALRYAMESGNEQILKQISGLPRGDAVAFGSAFNLPVRISINQARPGPKSSDAVFSEEWANCTELRC

SEQ ID NO: 195 - protein, 394 aa, Escherichia coli
MDRSAVDTIRGYCYQVDKTIIEIFSLPQMDDSIDIECIEDVDVYNDGHLTAIQCKYYESTDYNHSVISKPIRLMLSHFKDNKEKGANYYLYGHYKSGQEKLTLPLKVDFFKSNFLTYTEKKIKHEYHIENGLTEEDLQAFLDRLVININAKSFDDQKKETIQIIKNHFQCEDYEAEHYLYSNAFRKTYDISCNKKDRRIKKSDFVESINKSKVLFNIWFYQYEGRKEYLRKLKESFIRRSVNTSPYARFFILEFQDKTDIKTVKDCIYKIQSNWSNLSKRTDRPYSPFLLFHGTSDANLYELKNQLFNEDLIFTDGYPFKGSVFTPKMLIEGFSNKEIHFQFINDIDDFNETLNSINIRKEVYQFYTENCLDIPSQLPQVNIQVKDFADIKEIV

SEQ ID NO: 196 - protein, 571 aa, Escherichia coli
MSRNNDINAEVVSVSPNKLKISVDDLEEFKIAEEKLGVGSYLRVSDNQDVALLAIIDNFSIEVKESQKQKYMIEASPIGLVKNGKFYRGGDSLALPPKKVEPAKLDEIISIYSDSIDINDRFTFSSLSLNTKVSVPVNGNRFFNKHIAIVGSTGSGKSHTVAKILQKAVDEKQEGYKGLNNSHIIIFDIHSEYENAFPNSNVLNVDTLTLPYWLLNGDELEELFLDTEANDHNQRNVFRQAITLNKKIHFQGDPATKEIISFHSPYYFDINEVINYINNRNNERKNKDNEHIWSDEEGNFKFDNENAHRLFKENVTPDGSSAGALNGKLLNFVDRLQSKIFDKRLDFILGEGSKSVTFKETLETLISYGKDKSNITILDVSGVPFEVLSICVSLISRLIFEFGYHSKKIKRKSNENQDIPILIVYEEAHKYAPKSDLSKYRTSKEAIERIAKEGRKYGVTLLLASQRPSEISETIFSQCNTFISMRLTNPDDQNYVKRLLPDTVGDITNLLPSLKEGEALIMGDSISIPSIVKIEKCTIPPSSIDIKYLDEWRKEWVDSEFDKIIEQWSKS

SEQ ID NO: 197 - protein, 277 aa, Escherichia coli
MAYEAQISRTNPAAFLFVVDQSGSMSDKMSSGRSKAEFVADALNRTLMNLITRCTKSEGVRDYFEIGVLGYGGQGVSNGFSGSLGGQVLNPISALEQNPARVEDRKRKMDDGAGGIIETAIKFPVWFDPIASGGTPMREALTRAAEELVTWCDAHPDCYPPTILHVTDGESNDGDPEEIANHLRQIRTNDGEVLILNIHVSSLGNDPIRFPSSDTGLPDAYAKLLFRMSSPLPEHLVRFAQEKGHTVGIESRGFMFNAEAAELVDFFDIGTRASQLR

SEQ ID NO: 198 - protein, 239 aa, Escherichia coli
MKLEFLGTVPKDPEYPKANEDKFAFSEDGRRLALCDGASESFNSKLWADLLARKFTADPKVNPEWVASALAEYSATHDFPSMSWSQQAAFERGSFATLIGVEEFEEHQAVEILAIGDSITMLVDCGKLICAWPFDNPEKFNERPTLLATLYAHNNFVGGSTFWTRHGKTFYLEKLTQPKLLCMTDALGEWALKQALAEDSGFIELLSLQTEEELAELVLRERAAKRMHIDDSTLLVLSF

SEQ ID NO: 199 - protein, 561 aa, Escherichia coli
MPYPSLEQYNQAFQLHSKLLIDPELKSGTVATTGLGLPLAISGGFALTYTIKSGAKKYAVRCFHRESKALERRYEAISRKISSLRSPYFLDFQFQPQGVKVEGISYPIVKMAWAKGETLGEFLEVNRRSAQAIAKLSASIESLAAYLEKEKIAHGDFQTGNLMVSDGGATVQLIDYDGMFVDEIKTLGSSELGHVNFQHPRRKATNPFNHTLDRFSLISLWLALKALQIDPSIWDKSNSELDAIIFRANDFVDPGSSSILGMLSGIQQLSTHVKNFAAVCASAMEKTPSLGDFIASKNIPISLASISMNGDIPVSRLKPGYIGAYTVLSALDYSACLQRVGDKVEVIGKIIDVKLNKTRNGKPYIFVNFGDWRGNIFKISIWSEGISALPSKPDASWIGKWISVIGLMEPPYVSGKYKYSHISITVTTIGQMTVLSEPDARWRLAGPNESRQTLTSTSSNQEALERIKSKSTTSTPMPMNTNATTANQAILNKLRASTQTVAAARAQTQHVVPNKSSTHYVAPTGTSASQPVQNIPSPASTSKQQTSQKNIVTKILKWLFG

SEQ ID NO: 200 - protein, 891 aa, Escherichia coli
MVGSRWYKFDFHNHTPASHDYKIPDISPREWLLAYMKQHVDCVVISDHNSGAWVDVLKGELENMSRDASTGDLPEFRPLTLFPGVELTATGNVHILAVLHTHSTSADVERLLAQCNNNSPIPSEVPNHQLVLQLGPAGIISNIRRNPKAVCILAHIDAAKGVLSLTNQAELTAAFQESPHAVEIRHRVEDITDGTRRRLIDNLPWLRGSDAHHPEQAGVRTCWLKMSSPDFDGLRHALLDPENCVLFDQLPPEEPASYLRSLKFRTRHCHPVGQDSASVEFSPFYNAVIGSRGSGKSTLIESIRLAMRKTEGLTATQGSKLDQFIRTGMEADSFIECIFHKEGTDFRLSWRPDSKHELHIFSDGEWMPDSHWSADRFPLSIYSQKMLYELASDTGAFLRVCDESPVVNKRAWKERWDQLEREYLNEQITLRGLRARQGSADSLRGELSDAERAVSQLQSSAYYPVCRQLALARNELSAATLPLEHFERRIAAIQALAEEPLQRSDIPPEPSGLLMAFMARLSSVQQQYDQRLNTLLAEYAAELAGIRREQSFIALRTAVSDQETNVESEAVSLRARGLNPDVLNELMARCESLKNELRNYDGLDGAISASVARSEQLLAEMRAHRMALTDNRKAFLSSLSLSALEIKILPLCAPYEDVISGYQTVTGISNFAERIYDNSDGSGLLSDFISERPFSPLPAATEKKYRALDELKALHHSIRLDNSEAGAGLHGSFRNRLRSLNDQQLDALQCWYPDDGIHIRYQTPGGQMEDIAFASPGQKGASMLQFLLSYGTDPLLLDQPEDDLDCLMLSMSVIPAIMSNKKRRQLIIVSHSAPIVVNGDAEYVISMQHDRTGLYPGLCGALQEAPMKALICRQMEGGEKAFRSRYERILS

SEQ ID NO: 201 - protein, 1272 aa, Salmonella enterica [sequence omitted]

SEQ ID NO: 202 - protein, 384 aa, Escherichia coli
MDYLSEVLKIIEGATKANASMASNYAGLLADKLEQKGEVKQARMIRERLLRAPQALAGAQRAGGGISLGSLPVDIDSRLNTVDVSYPKLDSSEIFLPAAISTRVEEFITNVQRYDEFVKADAALPSRMLVYGKPGTGKTMLSKYIATRLDFPLLTVRCDTLISSLLGQTSKNLRQVFDYVMQRPSVLFLDEFDALAGARGNERDIGELQRVVISLLQNMDAASEDTVIIASTNHEQLLDPAIWRRFSFRIPMPLPDIHQRELIWKNRLKNMICSDLDLSDLSRKSEGLSGAIIEQVSLDARRDAVIEGASVINHHKLYRRLYLAQSLMEGVNLSTYEDEIRWLRSKDKKLFSIRVLANLYKLTSRVISNILKESGAYEQKGYTV

SEQ ID NO: 203 - protein, 754 aa, Escherichia coli
MSRRGTQFSNAKVTNPMLRIPFSSSDLGAIVNAGGGAKVLVDVTAEYRQGLVRNLTTSKHYLESKLSEYPGSLGTLVFKLRDQGIAKTHRPNKIAQEAGLQNAGHAKIDEMLVAAHAGCFDVLESVILHRNIKAILANLSAIERIEPWDENRKVPGGTDGLFESSNILVRLFEYTGEDATYNNYENVISILEQHGVKYDEIRQKCGLPLLRIMDLSPNDRYILDILIDYPGIRTLIPEPKYSAFPVSVSDSVGIETNSFPVPSEELPIVAVFDTGVSPIAATITPWVVSRETYVIPPDTSYEHGTMVSSLISGAHFLNDNHPWIPDTKSKIHDVCALDENGSYISDLILRLADAVNKRPDIKVWNLSLGGGPCNEQTFSDFAMELDRLSDKFGILFVVAAGNYVDEPIRTWPNPDPLGGADLISSPGESVRALTVGSVSHMEANDALSEIGTPTPYTRRGPGPVFTPKPDIIHAGGGVHRPWNVGASSLKVVGPDNRLCSNFGTSFAAPIVASLAAHTWQRIATNTDFNVSPSLIKALLIHSAQLSSPDYSPSERRYLGAGIPNEVIETLYDSDDRFTLIFQTFLVPGVRWRKDNYPIPSALIQNGKFKGEIVITAAYAPPLNPNAGSEYVRANVELSFGLIENNTIKGKVPMEGENGQSGYERAQIEHGGKWSPVKIHRKAFNKGITSGNWALQAKTTLRANEPALMEPLPVTIVVTLKSLDGNTQVYADGVRALNANNWAHYPLPARVPVSV

SEQ ID NO: 204 - protein, 1022 aa, Escherichia coli
MKTVRSACQLQPKALEINVGDQIEQLDQIINDTNGQEYFKKTFITDGFKTLLSKGMARLAGKSNDTVFHLKQAMGGGKTHLMVGFGLLAKDAALRNSHLGSMPYQSDFGSAKIAAFNGRNNPHSYFWGEIARQLGREGVFREYWESGAKAPDEQAWINIFDGEEPILILLDEMPPYFHYYSTQVLGQGTIADVVTRAFSNMLTAAQKKKNVCIVVSDLEAAYDTGGKLIQRALDDATQELGRAEVSITPVNLESNEIYEILRKRLFLSLPDKNEVSEIASIYASRLAEAAKAKTVERSAEALANDIESTYPFHPSFKSIVALFKENEKFKQTRGLMELVSRLLKSVWESDEEVYLIGAQHFDLSIHDVREKLAEISEMRDVIARDLWDSTDSAHAQIIDLNNGNHYAQQVGTLLLTASLSTAVNSVKGLTESEMLECLIDPNHQGSDYRNAFTELAKSAWYLHQTQEGRNYFSHQENLTKKLQGYADKAPQNKVDELIRHRLEEMYRPVTKEAYEKVLPLPEMDEAQATLRSGRALLIISPDGKTPPGVVGNFFKGLVNKNNILVLTGDKSSIASIEKAARHVYAVTKADNEITASHPQRKELDEKKAQYEQDFQTTVLSVFDKLLFPGNNRGEDVLRPKALDSTYPSNEPYNGERQVVKTLTSDPIKLYTQINENFDALRARAESLLFGTLDEARKTDLLDKMKQKTQMPWLPSRGFDQLAIEAYQRGVWEDLGNGYITKKPKPKTTEVIISEDSSPDDAGTVRLKIGVANAGNSPRIHYAEDDEVTESSPVLSDNTLATKALRVQFLAVDPTGKNLTGNPTTWKNRLTLRNRFDEVARTVELFVAPRGTIKYTLDGSEARNGETYTVPIQLADQEATIYVFAECDGLEEKRNFTFAAAGSKEIPIIKDKPATLVSPSPKRMDSSAKTYEGLKIAKEKGIEFEQISLMVGSAPKVIHISLGEMKISAEFIETVLTHLQTVLSPEAPVVMTFKKAYTQTGHDLEQFVKQLGIEIGNGEVEQR

SEQ ID NO: 205 - protein, 195 aa, Escherichia coli
MNKTVDFGAPSEFGMHHFYVEIPAAPRDAVVIYEDYGFDGEDSRRETVECRLILARELWTKIRDDVRRDFNARLKIKKQSSGTWSTGKVKLDRFLGRELCVLGWAAEHASPDECLVICQKWLALRPEERWWLYSKTAAEAGRDDQTQRGWRKALYCALSDGANIKLETKKKPKSKKLQVEDETQDLFGFMEKGEF

SEQ ID NO: 206 - protein, 945 aa, Escherichia coli
MALQPFEWRDKPSLIEHLFPVQKISAETFKERMASHGQLLVSLGAFWKGRKPLILNKACILGSLLPATDNPLEDLEVFELLMGIDSESMQKRIEASLPASKQETIGDYLVLPYAEQIRIAKRPEEIDESLFVHIWNRVNNHLGTSAHTFAQLVEELGVARFGHRPRVADVFSGSGQIPFEAARLGCDVYASDLNPISCMLTWGALNVVGASAQKRVEIDKAQRDIVKKVQKEIDELDIESDGRGWRAKVFLYCVEVTCPESGWRVPLIPSLIISNSFRVVAELKPVPAERRYDISIREVSTDEELEFYKSGTIQDGEVIHSPDGKTQYRVNIKTIRGDYKEGKENLNKLRMWEKTDFAPRPDDIFQDRLFCVQWMKKKPKGSQYYYEFRTVTNDDLKREKKVIEHVASKLDDWQKQGLVPDMVIEAGDKTDEPIRTRGWTHWHHLFHPRQLLFLSLVNKYSLAEGKFNFLQCMNHLSKLTRWRPQAGGGGGSAATFDNQALNTLYNYPVRATGSIENILAAQHNHCGISENVSFVVNSHPAPELDVENDIYITDPPYGDAVKYEEITEFFIAWLRKNPPKEFAHWTWDSRRSLAVKGEDEGFRTGMVAAYRKMAQKMPDNGLQVLMFTHQSGAIWADMANIIWASGLQVTAAWYVVTETDSALRGGSNVKGTIILILRKRHQALETFRDDLGWEIEEAVKEQVESLIGLDKKVRSQGAEGLYTDADLQMAGYAAALKVLTAYSRIDGKDMVTEAEAPRQKGKKTFVDELIDFAVQTAVQFLVPVGFEKSEWQKLQAVERFYLKMAEMEHQGAKTLDNYQNFAKAFKVHHFDQLMSDASKANSARLKLSTEFRSTMMSGDAEMTGTPLRALLYALFEISKEVEVDDVLLHLMENCPNYLPNKQLLAKMADYLAEKREGLKGTKTFNPEQEASSARVLAEAIRNQRL

SEQ ID NO: 207 - protein, 907 aa, Escherichia coli
MAIKRFSSRTERLDTEFLAESLKGAAKYFRIAGYFRSSIFELVGEEIAKIPEVKIICNSELDLADFQVATGRNTALKERWNEVDVEAEALLKKERYQILDQLLHSGNVEIRVVPRERLFLHGKAGSIHYADGSRKSFIGSVNESKSAFAHNYELVWQDDDEESADWVEREFWALWTEGVPLPDAILAEIHRVSNRREVTVDVLKPEEVPAAAMAEAPIYRGGEQLQPWQRSFVTMFLEHREIYGKARLLLADEVGVGKTLSMATSALVSALLDDGPVLILAPSTLTIQWQIEMMDKLGVPAAVWSSQKKVWLGVEGQILSPRGDASSIKKCPYRIAIISTGLIMHQREKTDFVKEAGMLLKNRFGTVILDEAHKARIRGGLGDQASEPNNLMAFMLQIGRRTRHLVLGTATPIQTNVRELWDLLGILNSGAEFVLGDALSPWHDHEQAIPLITGQTQVTSEAEVWHWLSNPLPPSNEHHTVQQIRDYLSIDNKSFGYSHRFEDLDYMIQSLWLSECMTPSFFKENNPILRHTVLRKRKQLEDDGLLERVGVNTHPIKRNLAQYQSRFVGLGIPTNTPFQVAYEKAEEFSKLLQSRTRAAGFMKSLMLQRICSSFASGLKTAQKMLKHTVSDEDEDLVEDVEHLLSEMTPAEVACLREIETQLSRPEAVDSKLNTVKWFLTEFRTDGKTWLEHGCIIFSQYYDTAEWIAKELAKSLKGEVVAVYAGVGKSGLFRGEQFNNVERELIKSAVKTREILLVVATDAACEGLNLQTLGTLINVDLPWNPSRLEQRLGRIKRFGQTRKFVDMLNLVYSETQDEKVYNVLSERLRDTYDIFGSLPDTIDDEWIDNEEELNTRMDEYMHERKKAQDAFSVKYRGTLDPDAHLWERCATVLSRRDIVSKLSEPWGS

SEQ ID NO: 208 - protein, 613 aa, Pseudomonas brassicacearum
MSEQFVSEAAGTPHLAEQDDGLKNLKLLIESFNTDKLNSSEQKKLQELRSILSPLLKKGGVLADLFQDGKDVLAFPIDVDSVLQHLNQDMRDDWFTDTLQHKDLLSNKQSLHEVLHELLNEGNGQYIGSFRSVYNIPKKGLGIRYSLETDFYDRFIYQAICTFLIQFYDPLLSHRVLSHRFNKDRKSEKYIFKSRIDLWQTFEGVTRTALSNNQSLLATDLINCYENITIETIRTAFERSIEHINTSGPNKVLIRNAVQTLCNLLSRWGYSERHGLPQNRDASSFIANVVLNDIDHEMVRLGYDYYRYVDDIRVICPNTRVAKKALTELINQLRKVGMNINSGKTKILTQDSTANEVDEFFPTSDDRSLTIDNMWRSRSRRVIARSAKYIFQILKECIEEKQTQSRQFRFAVNRLIKLTDAGIFDIHATIATDLKALLISSLEDHAASTDQYCRLLGILDLNEHELNDIYNHLSDHERSVHSWQNFHLWLLLANRKYKSTNLITLATARIESDILQPEIAAIFIYLKCVGEAQVLIDNISKFESAWPYYHQRNFLLACSDFDHNQLKPLISKLGPKLKWTGSRAKPYFTNGMPLVERDKIAMLDLYDEITPYD

SEQ ID NO: 209 - protein, 515 aa, Pseudomonas brassicacearum
MTESKKALLFIADYTDQGQDRIFLWSDGTLGEVTISDLVDQKHELVCHDLWLIAPSLYRATNKLPSNITDIEELRILTSGKKKERESRDKKDISQLLSSFVSEETIARYKEIFNRKIPLDEAVLSSIGEALLKCSEVVKSDANTAGEWERFITIERPVNDYLIRSTSEGISISEEKLRYHKNKIEFEFYMALKSFSSDYDMPLEVPSDQAVIEYLEPKGFDFTGLDVDYILNFVPMQSHFAEDLIRLRKIQNSRRVLAAIPLSQSRIYPIVDSFGSITSRIYFKDPSLQNLAKHHRDILIPDTNKQLSYIDYDQFEAGVMAALSGDEKLLELYNSSDVYEIAAKEIFDDKSKRKQAKRLFLSYAYGMKRQHILAAAQGFGADRQNAKKFFEQFKTFEAWKVLVHEEFHRTGRIGTALGNYMHRERKGELTSKEKRSAISQIVQGTASLIFKKALLCLSSISEVKLKLPMHDAVLLEHPADYDMDRVINIFSEIMSEHFQNKIQGKASLSQFHEDL

SEQ ID NO: 210 - protein, 311 aa, Escherichia coli
MSVIRGLAAVLRQSDSDISAFLVTAPRKYKVYKIPKRTTGFRVIAQPAKGLKDIQRAFVQLYSLPVHDASMAYMKGKGIRDNAAAHAGNQYLLKADLEDFFNSITPAIFWRCIEMSSAQTPQFEPQDKLFIEKILFWQPIKRRKTKLILSVGAPSSPVISNFCMYEFDNRIHAACKKVEITYTRYADDLTFSSNIPDVLKAVPSTLEVLLKDLFGSALRLNHSKTVFSSKAHNRHVTGITINNEETLSLGRDRKRFIKHLINQYKYGLLDNEDKAYLIGLLAFASHIEPSFITRMNEKYSLELMERLRGQR

SEQ ID NO: 211 - protein, 550 aa, Escherichia coli
MTKQYERKAKGGNLLSAFELYQRNSDKAPGLGEMLVGEWFEMCRDYIQDGHVDESGIFRPDNAFYLRRLTLKDFRRFSLLEIKLEEDLTVIIGNNGKGKTSILYAIAKTLSWFVANILKEGGSGQRLSEMTDIKNDAEDRYSDVSSTFFFGKGLKSVPIRLSRSALGTAERRDSEVKPAKDLADIWRVINEVNTINLPTFALYNVERSQPFNRNIKDNTGRREERFDAYSQTLGGAGRFDHFVEWYIYLHKRTVSDISSSIKELEQQVNDLQRTVDGGMVSVKSLLEQMKFKLSEAIERNDAAVSSRVLTESVQKSIVEKAICSVVPSISNIWVEMITGSDLVKVTNDGHDVTIDQLSDGQRVFLSLVADLARRMVMLNPLLENPLEGRGIVLIDEIELHLHPKWQQEVILNLRSAFPNIQFIITTHSPIVLSTIEKRCIREFEPNDDGDQSFLDSPDMQTKGSENAQILEQVMNVHSTPPGIAESHWLGNFELLLLDNSGELDNHSQVLYDQIKAHFGIDSIELKKADSLIRINKMKNKLNKIRAEKGK

SEQ ID NO: 212 - protein, 216 aa, Escherichia coli
MRELARLERPEILDQYIAGQNDWMEIDQSAVWPKLTEMQGGFCAYCECRLNRCHIEHFRPRGKFPALTFIWNNLFGSCGDSRKSGGWSRCGIYKDNGAGAYNADDLIKPDEENPDDYLLFLTTGEVVPAIGLTGRALKKAQETIRVFNLNGDIKLFGSRRTAVQAIMPNVEYLYTLLEEFDEDDWNEMLRDELEKIESDEYKTALKHAWTFNQEFA

SEQ ID NO: 213 - DNA, 2349 bp, Artificial Sequence
  Synthetic
cccgcgcccaccggaaggagctgactgggttgaaggctctcaagggcatcggtcgagatcccggtgcctaatgagtgagctaacttacattaattgcgttgcgcaagcttctgcagaattcgcaataactagcataaccccttggggcctctaaacgggtcttgaggggttttttgctgaaacctcaggcatttgagaagcacacggtcacactgcttccggtagtcaataaaccggtaaaccagcaatagacataagcggctatttaacgaccctgccctgaaccgacgaccgggtcgaatttgctttcgaatttctgccattcatccgcttattatcacttattcaggcgtagcaccaggcgtttaagggcaccaataactgccttaaaaaaattacgccccgccctgccactcatcgcaatactgttgtaattcatttaacattctgccgacatggaagccatcacagacggcatgatgaacctgaatcgccagcggcatcagcaccttgtcgccttgcgtataatatttgcccatagtgaaaacgggggcgaagaagttgtccatattggccacgtttaaatcaaaactggtgaaactcacccagggattggctgagacgaaaaacatattctcaataaaccctttagggaaataggccaggttttcaccgtaacacgccacatcttgcgaatatatgtgtagaaactgccggaaatcgtcgtggtattcactccagagcgatgaaaacgtttcagtttgctcatggaaaacggtgtaacaagggtgaacactatcccatatcaccagctcaccgtctttcatcgccatacggaactctggatgagcattcatcaggcgggcaagaatgtgaataaaggccggataaaacttgtgcttatttttctttacggtctttaaaaaggccgtaatatccagctgaacggtctggttataggtacattgagcaactgactgaaatgcctcaaaatgttctttacgatgccattgggatatatcaacggtggtatatccagtgatttttttctccattttagcttccttagctcctgaaaatctcgataactcaaaaaatacgcccggtagtgatcttatttcattatggtgaaagttggaacctcttacgtgccgatcaacgtctcattttcgccaaaagttggcccagggcttcccggtatcaacagggacaccaggatttatttattctgcgaagtgatcttccgtcacaggtatttattcggcgcaaagtgcgtcgggtgatgctgccaacttactgatttagtgtatgatggtgtttttgaggtgctccagtggcttctgtttctatcagctgtccctcctgttcagctactgacggggtggtgcgtaacggcaaaagcaccgccggacatcagcgctagcggagtgtatactggcttactatgttggcactgatgagggtgtcagtgaagtgcttcatgtggcaggagaaaaaaggctgcaccggtgcgtcagcagaatatgtgatacaggatatattccgcttcctcgctcactgactcgctacgctcggtcgttcgactgcggcgagcggaaatggcttacgaacggggcggagatttcctggaagatgccaggaagatacttaacagggaagtgagagggccgcggcaaagccgtttttccataggctccgcccccctgacaagcatcacgaaatctgacgctcaaatcagtggtggcgaaacccgacaggactataaagataccaggcgtttccccctggcggctccctcgtgcgctctcctgttcctgcctttcggtttaccggtgtcattccgctgttatggccgcgtttgtctcattccacgcctgacactcagttccgggtaggcagttcgctccaagctggactgtatgcacgaaccccccgttcagtccgaccgctgcgccttatccggtaactatcgtcttgagtccaacccggaaagacatgcaaaagcaccactggcagcagccactggtaattgatttagaggagttagtcttgaagtcatgcgccggttaaggctaaactgaaaggacaagttttggtgactgcgctcctccaagccagttacctcggttcaaagagttggtagctcagagaaccttcgaaaaaccgccctgcaaggcggttttttcgttttcagagcaagagattacgcgcagaccaaaacgatctcaagaagatcatcttattaatcagataaaatatttctagatttcagtgcaatttatctcttcaaatgtagcacctgaagtcagccccatacgatataagttgtaattctcatgttagtcatgc

SEQ ID NO: 214 - DNA, 48 bp, Escherichia coli; identical to SEQ ID NO: 98

SEQ ID NO: 215 - DNA, 60 bp, Escherichia coli; identical to SEQ ID NO: 99

SEQ ID NO: 216 - DNA, 49 bp, Escherichia coli; identical to SEQ ID NO: 100

SEQ ID NO: 217 - DNA, 52 bp, Escherichia coli; identical to SEQ ID NO: 101

SEQ ID NO: 218 - DNA, 48 bp, Escherichia coli; identical to SEQ ID NO: 102

SEQ ID NO: 219 - DNA, 51 bp, Escherichia coli; identical to SEQ ID NO: 103

SEQ ID NO: 220 - DNA, 49 bp, Escherichia coli; identical to SEQ ID NO: 104

SEQ ID NO: 221 - DNA, 52 bp, Escherichia coli; identical to SEQ ID NO: 105

SEQ ID NO: 222 - DNA, 49 bp, Escherichia coli; identical to SEQ ID NO: 106

SEQ ID NO: 223 - DNA, 54 bp, Escherichia coli; identical to SEQ ID NO: 107

SEQ ID NO: 224 - DNA, 54 bp, Klebsiella pneumoniae; identical to SEQ ID NO: 108

SEQ ID NO: 225 - DNA, 45 bp, Klebsiella pneumoniae; identical to SEQ ID NO: 109

SEQ ID NO: 226 - DNA, 49 bp, Escherichia coli; identical to SEQ ID NO: 110

SEQ ID NO: 227 - DNA, 50 bp, Escherichia coli; identical to SEQ ID NO: 111

SEQ ID NO: 228 - DNA, 54 bp, Citrobacter rodentium; identical to SEQ ID NO: 112

SEQ ID NO: 229 - DNA, 49 bp, Citrobacter rodentium; identical to SEQ ID NO: 113

SEQ ID NO: 230 - DNA, 53 bp, Pluralibacter gergoviae
gctaacttacattaattgcgttgcgcatgtggttagttatcacagcactaacc

SEQ ID NO: 231 - DNA, 49 bp, Pluralibacter gergoviae
ccaaggggttatgctagttattgcggtgtataagaatccgagaccgaac

SEQ ID NO: 232 - DNA, 60 bp, Erwinia piriflorinigrans; identical to SEQ ID NO: 123

SEQ ID NO: 233 - DNA, 51 bp, Erwinia piriflorinigrans; identical to SEQ ID NO: 122

SEQ ID NO: 234 - DNA, 46 bp, Escherichia coli; identical to SEQ ID NO: 126

SEQ ID NO: 235 - DNA, 50 bp, Escherichia coli; identical to SEQ ID NO: 127

SEQ ID NO: 236 - DNA, 53 bp, Salmonella enterica; identical to SEQ ID NO: 124

SEQ ID NO: 237 - DNA, 52 bp, Salmonella enterica; identical to SEQ ID NO: 125

SEQ ID NO: 238 - DNA, 48 bp, Salmonella enterica; identical to SEQ ID NO: 128

SEQ ID NO: 239 - DNA, 51 bp, Salmonella enterica; identical to SEQ ID NO: 129

SEQ ID NO: 240 - DNA, 48 bp, Escherichia coli; identical to SEQ ID NO: 130

SEQ ID NO: 241 - DNA, 43 bp, Escherichia coli; identical to SEQ ID NO: 131

SEQ ID NO: 242 - DNA, 52 bp, Escherichia coli; identical to SEQ ID NO: 132

SEQ ID NO: 243 - DNA, 56 bp, Escherichia coli; identical to SEQ ID NO: 133

SEQ ID NO: 244 - DNA, 49 bp, Cronobacter sakazakii; identical to SEQ ID NO: 134

SEQ ID NO: 245 - DNA, 52 bp, Cronobacter sakazakii; identical to SEQ ID NO: 135

SEQ ID NO: 246 - DNA, 55 bp, Escherichia coli; identical to SEQ ID NO: 136

SEQ ID NO: 247 - DNA, 51 bp, Escherichia coli; identical to SEQ ID NO: 137

SEQ ID NO: 248 - DNA, 50 bp, Escherichia coli; identical to SEQ ID NO: 138

SEQ ID NO: 249 - DNA, 51 bp, Escherichia coli; identical to SEQ ID NO: 139

SEQ ID NO: 250 - DNA, 48 bp, Escherichia coli; identical to SEQ ID NO: 114

SEQ ID NO: 251 - DNA, 46 bp, Escherichia coli; identical to SEQ ID NO: 115

SEQ ID NO: 252 - DNA, 53 bp, Escherichia coli; identical to SEQ ID NO: 116

SEQ ID NO: 253 - DNA, 54 bp, Escherichia coli; identical to SEQ ID NO: 117

SEQ ID NO: 254 - DNA, 57 bp, Escherichia coli; identical to SEQ ID NO: 118

SEQ ID NO: 255 - DNA, 52 bp, Escherichia coli; identical to SEQ ID NO: 119

SEQ ID NO: 256 - DNA, 60 bp, Salmonella enterica
tgagctaacttacattaattgcgttgcgcaatgatgaagatcacctaaaatgataggttg

SEQ ID NO: 257 - DNA, 55 bp, Salmonella enterica
cccaaggggttatgctagttattgcgcagctgttaattgtatattgatgcgatgc

SEQ ID NO: 258 - DNA, 52 bp, Citrobacter gillenii; identical to SEQ ID NO: 140

SEQ ID NO: 259 - DNA, 48 bp, Citrobacter gillenii; identical to SEQ ID NO: 141

SEQ ID NO: 260 - DNA, 54 bp, Salmonella enterica; identical to SEQ ID NO: 144

SEQ ID NO: 261 - DNA, 56 bp, Salmonella enterica; identical to SEQ ID NO: 145

SEQ ID NO: 262 - DNA, 52 bp, Escherichia coli; identical to SEQ ID NO: 142

SEQ ID NO: 263 - DNA, 46 bp, Escherichia coli; identical to SEQ ID NO: 143

SEQ ID NO: 264 - DNA, 53 bp, Escherichia coli; identical to SEQ ID NO: 146

SEQ ID NO: 265 - DNA, 49 bp, Escherichia coli; identical to SEQ ID NO: 147

SEQ ID NO: 266 - DNA, 47 bp, Escherichia coli; identical to SEQ ID NO: 148

SEQ ID NO: 267 - DNA, 47 bp, Escherichia coli; identical to SEQ ID NO: 149

SEQ ID NO: 268 - DNA, 2349 bp, Artificial Sequence; identical to SEQ ID NO: 213
  Synthetic

SEQ ID NO: 269 - DNA, 13703 bp, Escherichia coli; identical to SEQ ID NO: 3

SEQ ID NO: 270 - DNA, 11823 bp, Escherichia coli; identical to SEQ ID NO: 4

SEQ ID NO: 271 - DNA, 1921 bp, Escherichia coli; identical to SEQ ID NO: 7

SEQ ID NO: 272 - DNA, 2063 bp, Shigella dysenteriae
agttaatgactattgtgagcgagaaacgcgctactactatatatagacagacaagatgcacttactgaataaatactcataacggagaaaccagctgtatagtgaacaatagatttccagtagcatatttttacttcacttttagttattaatatgataatcataaactacggctctgccttaaatttgtgaggttgtttcgcctcgaaggaactaatgttaggacatacgccaccgttcagtcgatggtaacgcttcttaactagtggtccgctaagtgatgcgcaaagtgattgggcagagccgaaacgtttacaatccgataggagttggttttgtcgctacatgataaattattaatgcataacttcgcattagccaataaaaaaagccctgacttcatatctgaacttcctcaaattgaacctaaaccatacagcaatggacataaaattaaatggataaaccacacacttactagcactgaagttactccccctgataacctgattaaaatatgcatattgattgagtcaggggaaattgctataacatcagtaagtgatattgccaatttacttggagttcctgctggccaattactttatatactatatcgtaaaaaagataattatcgtacttttgaaatagaaaagaagaatggtaaaaaaagagtcattaatgctccttgtggcggtctatcgatactccaaacgagactaaagcccgttcttgaatatttctacaggccaaagaaatctgctcatggttttataaaaggaaagagcatcattactaatgctgggatgcatattaaaaaaaattttgtcgtaaacattgatctagaaaactatttcgaatcaataagttttgctagggtttatggaatatttaaaagtaaaccttttaattttgctcatcctgcagctactgttttagctcagttatgtactcacaatggaaaattacctcaaggtgcgtgtacatcgccaatattagcaaatattgcatcagcttctctagacaaacagctcacccaatttgcaggaagaaaaaaaatatcttattctaggtatgctgacgacataactttttctttcaatcagagaaatattgatataatcaaaaaaaacgacgacggaagttatagtcttagtgaaactatagacaatattatttcaaaaaatggctttaaaataaattatgataaatttagagttcaaaccagaaatacaagacaaagtgttactggcttagtggttaatgataaagttaacattaacagaagatatataagaattacacgttcaatgattcatagatggacagatgataagctaaagtatgcacttctctttgctacagaaaaaggatatcaggcaaaggataataaccacgcaattcaaattttccgaaatcatatttatggaaggcttagctttataaaaatggttagagggaaagactatccaggatatttaaaactgatgtcatacatgagtcataacgatccattaaaaacccaagaaggattgcgagcaatgaaagaaacagaaaactttgatgtttttatatgccatgcaagcgaagacaaaaaagacattgcaattccaatatatgacgagttaactaaacttaaaatttcagccttcatagatcatgttgagataaaatggggcgactccttaattgataaaataaatgcagcactagttaaatcaaaatatgtcatcgctattttatctgctaattcagtcaataaggaatggcctcaaaaagaattaagagcagttttagccagcgaaatatcgagtggcgacgtaaaacttttgaccttattaaaaaaagaagacgaggaggtcgtaaacctatcattacctttacttagtgataagttttatatggtctatgataataatcctgaagtagtcgccaacaatattaaatcactcttacaacgataattctctcacaaaagaaaatgtgcagattgatgcgtattaagtattaatctgcacatacaaaaaaaataataaaataatacatttttcataacttgtagg

SEQ ID NO: 273 - DNA, 2038 bp, Escherichia coli
cgcgctatcacgtaaaataggcaaaatacttctggaaaacagaaagttgaagtgatatgttcataaacacgcatgtaggcagatttgttggttgtgaatcgcaaccagtggccttaatggcaggaggaatcgcctccctaaaatccttgattcagagctatacggcaggtgtgctgtgcgaaggagtgcctgcatgcgtttctccttggccttttttcctctgggatgaagaagaaatgacaaaaacatctaaacttgacgcacttagggctgctacttcacgtgaagacttggctaaaattttagatgttaagttggtatttttaactaacgttctatatagaatcggctcggataatcaatacactcaatttacaataccgaagaaaggaaaaggggtaaggactatttctgcacctacagaccggttgaaggacatccaacgaagaatatgtgacttactttctgattgtagagatgagatctttgctataaggaaaattagtaacaactattcctttggttttgagaggggaaaatcaataatcctaaatgcttataagcatagaggcaaacaaataatattaaatatagatcttaaggatttttttgaaagctttaatttcggacgagttagaggatattttctttccaatcaggattttttattaaatcctgtggtggcaacgacacttgcaaaagctgcatgctataatggaaccctcccccagggaagtccatgttctcctattatctcaaatctaatttgcaatattatggatatgagattagctaaactggctaaaaaatatggatgtacttatagcagatatgctgatgatataacaatttctacaaataaaaatacatttccgttagaaatggctactgtgcaacctgaaggggttgttttgggaaaagttttggtaaaagaaatagaaaactctggattcgaaataaatgattcaaagactaggcttacgtataagacatcaaggcaagaagtaacgggacttacagttaacagaatcgttaatattgatagatgttattataaaaaaactcgggcgttggcacatgctttgtatcgtacaggtgaatataaagtgccagatgaaaatggtgttttagtttcaggaggtctggataaacttgaggggatgtttggttttattgatcaagttgataagtttaacaatataaagaaaaaactgaacaagcaacctgatagatatgtattgactaatgcgactttgcatggttttaaattaaagttgaatgcgcgagaaaaagcatatagtaaatttatttactataaattttttcatggcaacacctgtcctacgataattacagaagggaagactgatcggatatatttgaaggctgctttgcattctttggagacatcatatcctgagttgtttagagaaaaaacagatagtaaaaagaaagaaataaatcttaatatatttaaatctaatgaaaagaccaaatattttttagatctttctgggggaactgcagatctgaaaaaatttgtagagcgttataaaaataattatgcttcttattatggttctgttccaaaacagccagtgattatggttcttgataatgatacaggtccaagcgatttacttaattttctgcgcaataaagttaaaagctgcccagacgatgtaactgaaatgagaaagatgaaatatattcatgttttctataatttatatatagttctcacaccattgagtccttccggcgaacaaacttcaatggaggatcttttccctaaagatattttagatatcaagattgatggtaagaaattcaacaaaaataatgatggagactcaaaaacggaatatgggaagcatattttttccatgagggttgttagagataaaaagcggaaaatagattttaaggcattttgttgtatttttgatgctataaaagatataaaggaacattataaattaatgttaaatagctaatgaacagccctaacgttatgaacgctaaggctgatttttcg

SEQ ID NO: 274 - DNA, 2188 bp, Escherichia coli
gctcatgttatgcatgtgcatgaaaaccactgcataaagcgggcaggcgtggcggggatacgagcgcgcgccatgtggtatggagattggatctattcataacttgatgtataaagtagaaaaaaaagcggggagattatgaataaaaaatttaccgatgagcagcaacaacagcttataggacatctcacaaagaaaggcttctatcgaggagctaatattaaaataaccatttttctatgtggtggtgacgttgctaatcatcaatcttggcgtcatcaattatcacaatttttagcaaagttcagtgatgttgatatattttatccagaagatctatttgatgatcttttggctggtcaagggcagcatagccttttaagtttagaaaatattctggctgaagctgtcgatgtaataattttatttcctgaaagtccggggtctttcacagagcttggtgcgttctctaataatgaaaacttaaggagaaagttgatttgcattcaagatgcaaaatttaaatcaaaacgtagctttattaactatggtcctgttcgcctgttgcgtaagtttaattcaaaatctgttttgcgttgtagttcaaatgaactaaaagaaatgtgtgattcatctattgatgttgccagaaaattacgattatataaaaaattaatggcatctattaagaaggttaggaaagaaaataaagtatcaaaagatattggaaatatattatacgcagagcggtttctattgccttgtatctatttactggatagtgtcaactaccgcacactgtgtgaactagcttttaaagcgataaagcaagatgatgttttatctaaaattattgttagatccgttgtttctcgtctaataaatgaacgaaaaatacttcaaatgactgatggttatcaggtcactgctttgggggctagctatgttaggagcgtctttgatagaaagacacttgaccgattgcggcttgagattatgaattttgaaaaccgtagaaaatcaacatttaactatgataagattccgtatgcgcacccttagcgagaggtttatcattaaggtcaacctctggatgttgtttcggcatcctgcattgaatctgagttactgtctgttttccttgttggaacggagagcatcgcctgatgctctccgagccaaccaggaaacccgttttttctgacgtaagggtgcgcaactttcatgaaatccgctgaatatttgaacacttttagattgagaaatctcggcctacctgtcatgaacaatttgcatgacatgtctaaggcgactcgcatatctgttgaaacacttcggttgttaatctatacagctgattttcgctataggatctacactgtagaaaagaaaggcccagagaagagaatgagaaccatttaccaaccttctcgagaacttaaagccttacaaggatgggttctacgtaacattttagataaactgtcgtcatctcctttttctattggatttgaaaagcaccaatctattttgaataatgctaccccgcatattggggcaaactttatactgaatattgatttggaggattttttcccaagtttaactgctaacaaagtttttggagtgttccattctcttggttataatcgactaatatcttcagttttgacaaaaatatgttgttataaaaatctgctaccacaaggtgctccatcatcacctaaattagctaatctaatatgttctaaacttgattatcgtattcagggttatgcaggtagtcggggcttgatatatacgagatatgccgatgatctcaccttatctgcacagtctatgaaaaaggttgttaaagcacgtgattttttattttctataatcccaagtgaaggattggttattaactcaaaaaaaacttgtattagtgggcctcgtagtcagaggaaagttacaggtttagttatttcacaagagaaagttgggataggtagagaaaaatataaagaaattagagcaaagatacatcatatattttgcggtaagtcttctgagatagaacacgttaggggatggttgtcatttattttaagtgtggattcaaaaagccataggagattaataacttatattagcaaattagaaaaaaaatatggaaagaaccctttaaataaagcgaagacctaat

SEQ ID NO: 275 - DNA, 3551 bp, Escherichia coli
acgtgtcttgatttaagttgacttcaagactataaagtctcaagtaacagtcggttagcttccttcatgggttggtcatgccgggttgttaagtatggctgtttgcgataagctttaaatactctttagcgttggacggttacgtctagtcgggtgattagccagactctaacttattgaacgtattaagggttgcgaaagtgtcgcaacccgagatcgttcctctctcgggttgcgacactttcgcttcctcaagtaaagagtgaagcccggcgcaaatgcgccgggccattttcaggtactgttatgtctgttattcgtggattagctgcggttttacgtcaaagtgactccgatatcagcgcctttcttgtaaccgccccgagaaagtacaaagtttacaaaatccctaagcgtacgacgggatttagagtcattgcccagcctgccaaagggctaaaagatatccaacgagcctttgttcagctctatagcctccctgttcatgatgcttcaatggcctatatgaaagggaagggaattcgtgataatgctgcagcacatgctggcaaccagtatctcctaaaggcggatctggaggatttttttaactcaattacaccggcaattttttggcgttgcattgaaatgtcatctgcgcaaacacctcaatttgaacctcaggataagctttttattgaaaagatccttttctggcaaccgataaagcgtcgcaaaaccaaattgatattgagtgttggtgcgccttcttcaccagtcatatccaatttctgtatgtatgagttcgataatcgaattcatgcggcttgcaagaaggtggagataacatacacacgctatgcagatgatctcacgttctcgtctaatatccctgatgtactgaaagcagttccttcaacgcttgaggtcttactgaaggatttatttggaagcgcgctcagacttaatcacagcaaaacggttttttcatcaaaagcacataaccggcatgtgactggtataacaataaataatgaagagacactttcactcgggcgcgatagaaaaagatttatcaaacatctgattaaccagtataagtatggactccttgataatgaggataaagcttatctgatcgggctgttagcatttgccagccatatcgagcctagtttcatcacacggatgaacgaaaaatactcattagaactcatggaacgcctgagaggacagagatgaccaagcaatatgaaagaaaagcaaagggtggaaatttactgtcagcattcgaactttaccaacgtaatagtgataaagcgcctggtctgggtgaaatgttagtgggtgagtggttcgaaatgtgcagggattacattcaggatggacatgttgatgagtcaggaatatttcgtccagataatgcgttctatcttcgccgcctgacgttaaaggattttcgccgtttctctcttctggaaattaaactcgaagaagatctgacagtcattattggcaacaatggtaaagggaagacaagtatcttatatgcgattgcaaaaacgctgagttggttcgtcgcgaacatcctgaaggaaggtggtagtggacaaaggttaagcgaaatgactgacataaaaaatgacgctgaagacaggtattcagatgtcagtagcactttcttctttggcaaaggacttaagagtgtgccgatcagattgtcacgctcagcccttggtacagccgaaaggcgggacagcgaggttaagcctgccaaggatttagctgatatatggcgagtcatcaatgaggtgaatacgatcaacttgccgacgttcgctctttacaacgttgagcgatcgcaaccgtttaaccgcaacataaaagataataccggacgcagagaagagcgctttgatgcctatagtcaaacgctcggtggcgcaggacgtttcgatcatttcgttgagtggtacatttacctccataagcgtactgtatcagatatctcaagttctattaaagaacttgaacaacaggttaatgacttacagcgtaccgttgatggcggtatggtttcggtaaaatcacttctggaacagatgaagtttaagcttagtgaagctatagaaagaaatgatgctgcggtttcctcgagagtgttaactgagtctgttcaaaaaagtattgttgagaaagcaatctgctcggttgtccctagtatcagcaatatatgggttgaaatgataacgggttctgatttagtcaaagttacaaatgatgggcatgatgttactattgaccaattatctgacgggcagcgtgtatttctgtcgttggtggccgatcttgcgcgaagaatggttatgctgaatcccctgctggaaaatccattagagggacgtggcattgttttaattgatgaaatagaacttcaccttcatcctaagtggcagcaggaagttatcctgaacctgcgcagtgcattccctaacattcaatttattattacaacacacagtcccattgttctttctacaattgagaaacgctgtattcgtgagtttgagcccaacgatgatggcgaccaatcattccttgattctcccgatatgcaaacaaagggaagtgagaatgctcaaattcttgagcaggtaatgaacgtacattctacaccgcctggtattgctgaatctcattggttaggtaattttgaactattgcttttagataattctggagaacttgataaccactctcaagtgctttacgaccaaatcaaggcgcactttggcatcgatagtattgagttgaagaaagcagatagccttattcgcattaataagatgaagaataaactgaacaagataagggccgagaaggggaaatagtaatgagagagttagcccggctggagagaccggagattcttgaccagtatatagccggtcaaaatgactggatggagattgatcagtctgcggtatggccgaaattaactgaaatgcagggcggattttgtgcctattgcgagtgccggttgaacagatgtcatattgagcatttcaggccaaggggaaagtttcctgctctgacgtttatctggaataacctgtttggttcttgtggcgattcaagaaaaagtggcgggtggtcacgttgcggtatatataaggacaatggtgctggcgcctacaatgctgatgatcttataaaacctgatgaagaaaatcctgacgactacctgctatttctcactactggagaggttgtaccggctatcggactcacggggagagcgcttaaaaaagcgcaggaaactatccgtgtttttaacctgaacggtgacataaagttgtttggcagtcgcagaactgcagtgcaagcaatcatgcctaatgtcgaatatttgtatactctactcgaagagtttgacgaagatgactggaatgaaatgcttagagatgagctcgaaaagatagaatctgatgaatacaaaacggccctaaaacatgcatggactttcaaccaagagttcgcataatcctaaa

SEQ ID NO: 276 - DNA, 4451 bp, Klebsiella pneumoniae
gtccttaaacacgacaaaacctgtgatacttaccatggattcctctatgaaggaaaggtagtatagccattttgggtgatacatacagtgaatgtcattgctgtagttgaagtgagtaagagcgcttaagattaagttgagagaaaatgaaactacttgataaaaagtattacaacctcgagcccaaatatgagtaccttaaggactcatttattttaggactggcatggaaaaaaacagatagttttgtaagaactcacaattggtatgcagatattttagagctggacaagtgtgcgtttgatattagtgatgaagtcactaattggtcaaacgagatctcaaagaacgctctttccaaaagtgatattgaattgataccggctccaaaaggagcaagctggttcattaatcaaggtaaatggactaccaataaagataatagaaagataaggcctttggctaacatatctattagggatcagtcttttgctacagcagtaacaatgtgccttgctgatgctatagaaacaagacagaaagactgttcgttgagcaatcttggctatgctgagcatgtaaagaacaaggttgttagttacggaaataggcttgtctgcgattgggacaatgaaagggcaagatttcgttggggaggaagtgaatattataggaagttctcttccgattatcgaagctttctacaaagacctatctatataggcagggaaacagtaaataaagttagcggaattgatgatgtatatatcatcagtttagatctgaaaaattttttcggttctataaaaataaaccttctgttagaaaaaatcaaaaaaatatccgctgatcattatgcagctaaattcataaatgataatgaattttggactttggcgaatcggattttaagttgggattggcctgaagaatctttatctttacttgagagtttggatataaaagaaaaaaatgttggtcttccccagggattagcttctgctggtgctctggcgaatgcatatctcattgagtttgatgaatctttaatttctaagcttcgtactaagatagaagacagccaaataatactgcatgattattgtcgatatgtcgatgatattagattagtgatttcaggagaagcactagaaagtaataagattaaggaatctattcatgcattagttcagggcattcttgatgagacattggctcaaaatccgtcagataatgaaccatatttaaaaattaacgatagcaagacttatattcttgagctttcagacattgacaacggaagtgggcttacaaatcgaatcaatgaaattcagcatgaagtaggagcttcgagtatcccagagcgtaacggactcgataataatatcccggcacttcaacaattattactgaccgaacaggataatttttccgaggatgttgatagtttatttcccgggtttaaaaatgataagtcgataaaggtagaatctgtacgtagattttctgcccataggctggaaaaaagtttggctaaaaaaagcaagctaatttcacctgaggagaggaaacaatttgataatgaaacctcactgattgcaaaaaaattattaaaagcttggctaaaagatccatcaattatggttatcttccgcaaagcgatagctatcaatcctaatctagatgcttatagcaccattcttgaaattattttttcaagaatacaacgcaatcgtgataaacgagataaatatataatgctgtatcttctttctgatatatttcgtagcgtcattgatgtctatcgaaacctagaatcagaatacgtcgacgattatcaaaaattgatgggtgaagttacattgtttgcccaaaaaatactttcctgcaaatcttttattccaaattacgcatatcagcaagcattattttatctcgcagtgatcaataaaccatttatagctagtaataaagcttcttttgatcttgcaaggcttcaatgcgtcttaattaaacagcatttagaaccgttgaatagtagtgatggatacctatttgaggtatctgctcaaatcagtaaagactaccgagcaaatgccgcttttctactttctcatacaaatagtaacaaagtagtagacttaattatcgaaaaatttgctttccgaggaggtgaattctggaatgcaatttggaaagaaattgttaggatgcaagataaagataggattaacgaatttagatgggccatatcaaaatatgagtcaaagccaaatagttcggagcactatctttcatcagtgatcagtttcaaggaaaacccatttagatatgaacatgcgcttctcaagctaggtgtagcattagttgaactctttgatgatacagagaaaaacgtatggcaacctgatggtaagcagtattctccacatgaaataaaagtaaaattagaaggtaactcaacctcatggggtgaattatggcgtccaaattttagtatttcatgctcgatagataagaaaggtgaacctggtaaagacccacgctatataagccctgagtggttggcaaattatccacagactcaaaatgatgaacaaaaaatctattgggtttgcagtgtgctaagaagtgctgctttaggcaatgtagattatactcaaagaaatgatttaaaacttgataaagctaagtatgatggtatccattctcagttttacaagcgacgtatgggaatgttacatacaccagagtcaattgttggttcatatggaactataacagattggtttgcaagttttcttcagcatggattgcaatggccaggtttttcttcttcgtatataagccaagaagatatattgtcaattactaatattattgagtttaaaaactgtttattggaacggctaggctacttaaataagcagatatgtatttcatcgaatgttccaaccttaccgactgttgtcaacaggcctgaattagcatctaaccattttagaattgttacggttcagcagttatttcctaaggatactaatttccatccttctgacgtgactttggctaatcccgatgtgcgctggaagcacagagagcaccttgcggaaatctgtaagctaacggagcaaactttaaatgcaaaacttaaaactgagtctagggaacatacaagcacagctgatctaatcgttttttctgagttagcagttcacccagaagatgaagatatagttagagcactggcatttagaaccaaagccatcattttttccggctttgtcttctgtgaacaagatggccgaatagttaacaaagctcgttggattattccagactcttcagagtctgggacccaatggcgtgtccgtgatcaggggaaacatcatatgaccagtgatgaagtggctcttggcattcaaggatatagaccatcccaacatattatttcaattgagggtcaccctgagggaccatttaaattaactggtgcgatttgctacgatgcaacagatataaagcttgcggcagatctgagagatttgactgacatgtttgtcattgcagcatacaataaagatgtagacacatttgataatatggcttcagcactacaatggcatatgtatcagcatattgttattacgaatacgggagaatatggaggctcaactatgcaagccccgtacaaagagaaatatcataaattgatttctcatgctcatgggactggtcaaatagcaattagtactgctgatatagatttagcagcattcaggcggaagctacaaatatataaaaagaccaaaacccagcctgctggatacaatagaaaacattaaggatttttatggatactttagttaagttagctacaattatttctccattaattagtgctggagtagctatttgggcaattttggttgctaaaaaaaccatcagtgaaagcaaagaaattgccaagaaaaccatcgctgatacggcctaccaagcatatttgcaattagccatggagaacccacaattttcgaaaggctacagcgcagattgtagacaggagcgagaccctatgtatgatcaatatgtttggtacgtggctaggatgatattctgctttgagaaaatcatcgaggttgaagtaaacttaaaagatagttcttgggcaaatacgttggaaaaacatttgaagtttcattctgaacattttaagaaaacgaatgttgtcgaagaggctctctatattccccctattttggatctcataagatgtgcagctaactaataacttatcccaataggattatattccacacgataagcccactggaaaatgtaacatcccaagatagtttttgggattgtttcccagtgggcggaaagtatcatgatagttgtcacccccggtggagctgcaaagatttttatggggtgggtgttacattgcg

SEQ ID NO: 277 - DNA, 1780 bp, Salmonella enterica
acacgatataaaaccatctcattgcttgctgggttaactgagttgctgaatttttttctagaatttcgcaaaatttaataggtaaaccttgtttttttaaatttacgatgatataaaaataatgccctaaacaaaggtttaggggtattgtacaggttgtcaagcctcccacaggtcttggtgaaaccaatcactgtgacgacggtaagcaacacttggatgatattcataattgactccacgctactgattacattatacagcatatctaacatttgcggcgaggttcacaatttgtatttaggtactgattgtggatgagaaggttggagaaagaccacttggttaagccggaggatgtgtcctagaattgtcgctattctgtcatcctccggttttgctaatttcattcagggaatataatgaataatgatgattacccatggttcagaaaacgtggttatttgcatttcgatgaacctgtttcattaaaaaaagcggttaaatatgtttcctctccagaaaaaataataaaacattcttttctgccatttttaagctttgaagtaaaatcgtttaaaatcaaaaaagacaaatcaacaaaacaattaagtaaaactgaaaaattaagacctattgcctattcctcacatttggatagtcatatttatgcattttacgcagaatatcttactggacattatgaattattgatccaagaaaacaatttacacgagaacatccttgccttcagatctttaaataaaagcaatatagaatttgccaagagagcatttgatacaattactgaaatgggtgagtgtagcgctgttgcattagatctttctggtttttttgacaatttagatcatcaaattttgaaacaccagtggtgcaaagttattgggactgaagcgttgccgcaagaccattttgccatatacaaaagtataacaagatattctaaagttgataaaaatagagcgtatgagattttaggtatatcaaagaataaccccaagtataatagacgcaagatctgcacccctgttgattttagaaataagattagaaaaaatggtcttattatagttaataattcccaaaaaggtataccccaaggctcgccaattagtgctctactttcaaatatatatatgcttgactttgatattgaaatgagagattacgcgcaggaacgtggtggccattattatcgctattgtgatgatatgctattcattgtaccaactaagtataataaaactctagcaggtgatgtagcccagcggattaagcatcttaaggtagaactcaatactaagaaaactgagattcgagattttatatacaaagacagtaccttagtggcaaatatgcctttacagtatcttgggtttatttttgatgggagtaatatattattacgttcatcttctctcgcaagatattcggaacgaatgaaaagaggtgtccgcttagcaaaagctacaatggacagcaagaataggattagagaaaataaaggtgaagctttaaaagctttatttaagaaaaaattatatgccagatattcacatattggaagaaggaattttttgacttatggttatcgcgccgcgaagatcatgaattcgaaagctataaaaagacagttaaaaccattgcagaaaagattggaaaatgaaatactaaaataaatatttgctggcccgaatcatacagggccacaatacagttgaaaacaagctataataaacaacatctaatttttatatac

SEQ ID NO: 278 - DNA, 4995 bp, Escherichia coli
tctcaacttccccaaatgtccgtattcatccataaataccctgatttataacaattttaccgttttttagtccatcatcgtccgcagccatccagtagaatccgataaagaatgtgtataggattgtgtatatgttcctgttcggtcatggattcctatacacatgcctttaaacgatatgcagattcgccgcgctaagcctgaagataaaccctatacgcttggggatgggcaaggcttgtcattgcttatagaacctaatggaagcaagagctggcggttccgctatcgctatgccggtaaacccaagatgatctcgcttggcgtttacccaacgatcactcttgccgatgctcgttcccgtcgtgatgaagctcgaaaacttgtggcagaaggaaagaaccctagtgatgttcgaaaagagcaaaagctggctctgcaagcagagtcagagaacgccttcgaaaagatagccagagagtggcatcaacttaaatctgctaaatggtcggcaggatatgcatcagacatcatggaagcgtttaagaacgacatttttccttatgtgggaacaaggcctgtgagtgagattaaaccgctagagctgctgaacgtactgcgtaaaattgagaaacgtggtgcgttggagaaaatgcggaaagtgcgtcagcgttgctctgaagtgtttcgctacgcaattgcaacgggtagagcggagtacaatcctgcggcagatctttccagcgctctcgaagtgcaccaatccaatcatttcccgttcctaaaagctgatgagatacccgaatttctgcgtgccttagagagttacaccgggagtaagcttgtccagatagcaacgaaattactgatgattacgggcgtgagaaccatcgaattacgcgcggcattatggcaagaatttgatctggataacgctatttgggaaattcctgctgaaaggatgaaaatgcgcaggccgcatcttgtgccattgtcgacccaagcgttagatttactccatgaactcaagataatgacagggaactatcgttatgtttttccaggacggaacgatccgaacaaaccgatgagcgaagctagcataaatcaagttatcaagcgtatcggttacgaaggccgactcactggtcacgggttcagacatatgttatcaacaattttgcatgaagaaggttttcaatcagcatttattgaagtccaattagctcatgttgatagaaataatataagaggaacttataatcatgccatataccttatggaaaggcagaagatgatgcaatggtacagtgattatcttcgcaaaaaaaaggggttataatatgttaaaccagtcattttccgtttcgaacttaattaagcttttaaaaaaaaccgatccaaaaagatacaaaattggtaggaattcagctgaatataaaaaatatatagctgataaagttaatggctcaattgaaacatactcatttggttcgatctcaaattcaagaattaacaacaaaaatgtgtatatatttaaagattttatggatgtacttgtcgccaggaaaataaatgataacattaagcgtgtgtatagtgttaaacaaaacaacagacatgacatcataaaaaaagtaaatacagtgttaagtgagcctgtaaattattatatttacaggctggatattaagagtttttatgaatcaatagataaaaatatcgttttccaaagaattaataataacccgattatttctcataatactaaaaaatttatcaatggtctttttaaacataacgctttctctgcaaataacggacttccccgtggtatgggattaagtgcgactttatcagaaatatttatggaggaatttgatgctgagttggcgaggctgcctgaagtattttatgcttcaagatatgtggatgatatcatagttttttcattctataaaataccagattataaaaattatttttcaaggattttaccaaatggattacatttaaatgaaagaaagtgcagtgagtataccatagaggacacttcaactaaacattctgaaattgagtttttgggatattcatttattatacaccatggattaaaaaatcagcgtcgtcatgttgtgatcagaatttcggaggagaaaataaagaaaataaaaagaaggattgcacttgcggtaaaagattactcaaataattctgatgcagaactcttgaagaaaagaataaagtatttaactggtaatatattagtaaactccaatagtaataaaactgatgctttatatagtggaatttattacaattatcaacatttaactgataaaacacagctcaaggaacttgatatatttaagaataggatgctattttcttcaaagggcgaggtggggagaaaaattttagcagcaggtcacaacttattaactgcgcctaaaaaatactcatttttggctggttttgaaaaacggctactgtcttcttttaaacgggaagatattattaaaataaataaggtttggtgattcatgaaaattaaaatatcgaagagtgattataaaagagtacttctcacggatattttaccatatgaagtccctatccttttttctaacgaaggtttctataagttaatttctgaaaataaagttttacccggaacattttcagaaggccttaagctggattcttataccatcccttactcctataaaataaaaaaggggctggcgagttctcgaagccttggcattatacatccttcaacgcagttaagaatctgtgatttttatgataagtatgaacatttgatggttcatatgtgtacaaaaagtccgttttcgctacgttatcctagcaaaatagggagctattattacgaaaaggacttcttaaaaagtagaataaatctaaaagatggtcttgtacaatttcataatcatggctttgattcccaagaaacttcctcatcttcccatttttcatataagaaatatcctttcatctataagttttatgagtcatatgaatttcatagattggaaaggaagtttaggaaacttttaaagcttgatattgctaagtgttttagtcatatatatacacacagcgtttcatgggctgtaaaatctaaagaattctctaaggttaatagaacttataacagctttgaaggttgtttggataagctttttcaagatgccaattatggtgaaacaaatggcataataattgggcctgaattttcaaggatatttgcggagattatattacagcgcgttgacttgaatgttgagtctcatttgaatcttgagccaggcatagttaaagataagagctatgctataagacgttacgttgatgattattttatatttgcggatgatgatgaaacatttaagctaatagaatttgtactggcaaatgaactcgaaaaatataagctttatttgaatgaatctaaaaaggaatttatcgagaggccattcgtgactggagctacgatggctaaaaatgatattgcagaaatcattgaggatttatatggatcgttaatccatactgagaagttggatgagttaacagctatggttaatttaaatccagacgtcaaaattcagcctgaaaatatgaatgacctttttccattgaaaggtgtgtggaataaaaagctacacgcggacaaatttataaaacgaatcaaaattgcggttagaaaaaacaataccacatttgatcttgttagctcatacttattaagtgcgattaagagtaagtttttcaaagtaattaggctgttgaggatgttcgatctgtcaggaaaagaagatataacttataaattcttctcaatattcaatgaggtgattttttttatttatgctatggattttcgagtccgacagacatacataattagccaagttattttggaaataaattcatttgctaataagcaagcttcagacattagtgaagttataaaaaagaatacttttgatgagcttcttatgtgcatgaaaagcatgggtaatattcatgagaggccagtggagttatctaacttacttatatgtatgaaaggtttgggggagcagtataaactcaatccagatgaatttaaggatttgttgggtattagtgagaatgagtgtttttacgatttagaatatttttctatatgcagcatgttacactatataggcgatgatgttctctatctaaaaatgaaagaagatattgtccttgctatacagagtttgataagtggtcggaacgatataaaaaaagacactgaaacatttatgctattccttgatatgatgacgtgcccatatcttacagttaagcataagagaataatttatagaacatatgtcgaagcaaatacaggtcaaaaaagatttacgaatgcagtaattgattctgaaattgattctttaaaaaataatgtaatcttttttaactggtctggagatgctgatcttgagcacgttctttataaaaaagagttgcgaacagcatatgaatagtagtattttaatttcgttaaagggttgcgatgcctaaggtttcgacctgaagcagataccggaagatcggcttttgaatgttcatccgaaagatattcgcgatacgttttgaggatggaccgatttagacacactattgccttttagctaaacaggccgcgaaagcggcctttttaatgaatcagatttcccctcaccgatctcaatacttcccctcagcgtgcgcagccccgcccgcctgcccgcttcgcttaacagactggttttcatgcaccccttaaatcgtctcagaagccaccacacaagggctttcgcgtcaaaaatggcgcatgagactcatgcgttttcatgcgccatagatatgcactcatacgctctcaggccagctagggaaaaagcgtaaaaaatcccggtactggaccgagacttcgtgggcgtattttgctaa

SEQ ID NO: 279 - DNA, 1838 bp, Escherichia coli
agcatcggagcaaagtaactcaataccgaacaataaatatgagcccttcgtgaaaccgggtaaggtcaaactcataaaccaacaaaaggggaaaagtgggatatgtgaggcgtgtatgatttttatttattgggcttcgttaaaaatggtgatttaatagccctttaaatttatcactttttaactaactccgagggtttatggtcatttttgacgagaagcgacacctgtacgaggcactgctgcggcataactacttccctaatcagaaaggctctatttccgaaatccccccttgtttcagctcccggacctttacaccagagatcgccgagctgatctctagcgatacctccggccggagatctctgcagggctacgactgcgtggagtactatgccaccaggtataacaatttcccacgcacactgagcatcatccaccccaaggcctactccaagctggccaagcacatccacgacaattgggaggagatcaggtttatcaaggagaacgagaacagcatgatcaagcccgatatgcacgccgacggcaggatcatcatcatgaattacgaggatgccgagaccaagacaatcagggagctgaacgacggattcggcaggcgctttaaggtgaacgccgatatcagcggctgtttcaccaatatctattctcacagcatcccttgggccgtgatcggcgtgaacaatgccaagatcgccctgaacacaaaggtgaagaatcaggacaagcactggtctgataagctggactactttcagcggcaggccaagagaaacgagacccacggagtgcctatcggaccagccacatcctctatcgtgtgcgagatcatcctgagcgccgtggataagaggctgcgcgacgatggcttcctgtttcggagatacatcgacgattacacctgctattgtaagacacacgacgatgccaaggagttcctgcacctgctgggcatggagctgagcaagtataagctgtccctgaacctgcacaagaccaagatcacaaatctgcctggcaccctgaacgacaattgggtgtctctgctgaacgtgaatagcccaaccaagaagcggttcacagatcaggacctgaacaagctgagctcctctgaagtgatcaacttcctggattacgccgtgcagctgaacacacaagtgggcggcggctccatcctgaagtacgccatcagcctggtcatcaacaatctggatgagtataccatcacacaggtgtacgactatctgctgaatctgtcctggcactaccccatgctgatcccttatctgggcgtgctgatcgagcacgtgtacctggacgatggcgacgagtataagaacaagttcaatgagatcctgtctatgtgcgccgagaacaagtgcagcgatggcatggcctggaccctgtacttctgtatcaagaacaatatcgacatcgacgatgacgtgatcgagaagatcatctgctttggcgattgtctgtccctgtgcctgctggatagctccgacatctatgaggagaagatcaacaatttcgtgtctgatatcatcaagctggactacgagtatgatatcgaccggtactggctgctgttttatcagagattctttaaggacaaggccccaagcccctacaacgataagtgtttcgacatcatgaagggctatggcgtggacttcatgcctgacgagaattacaagacaaaggccgagtcctattgccacgtggtgaacaacccctttctggaagacggagacgagattgtgagtttcaacgactacatggctatcgcatgacttttaggcctcatt

SEQ ID NO: 280 - DNA, 1608 bp, Escherichia coli
aagtgaacggatgtatattgagtgcaatgtgattaactatctgttgttacaatatttagataggtgataaaatatgacatctaccattgatttttatgaatctgatttctcagccacattatacccattaaaaaccaatcaaatattactcaagcatcactcacaagagatgtcagaatatatttatcagaaggtcattaatcctgcatatccaacagatagttttctgtctcagcaaaaagtcttttcgactaaacctaaaggtcatttgagacgaactgtaaaattagatccagtagctgagtattttatttatgatgttatctatcgaaacaggaagatatttaggccagaagtaagcgagtcgagaaaaagctttggatatatttttaggaacggtagcaggatacctatccacgtttcctataatgaatataaacaaagcttaaaaaaatattctgagctatattctcacagtatacattttgacatagcatcttattttaatagtttatatcaccatgatataatccactggtttagctcaaaagaaggagttagccctgcggatgttgaagctctcggacagttttttcgcgaaattaactcaggacgaagtatcgattttatgccccaaggaatttatccggcaaaaatgatcggtaatgagtttctaaaattcgttgatttacatggtcgcctaaaatctgctcaaatagtaagatttatggatgactttactatttttgacaatgacattgaaacactaaataatgatttcatcagaatacagcagttattagggcaagtatccttaaatataaatccgtcaaaaaccacatttgacaatgtgatgggagatgtgaatgaaaccttaactcagatcaagtcatcacttaaagaaatcattacggaatatgaacatatacctacagcctcaggggtagaggtagtcgagactaatattgaaatcataaagcaccttgatgatgaacaagttaacaaattaatagacttgctaaaagatgaaaaaatagaagagtctgatgccgatttaattcttggttttttgagaactcataatgatagtttactttctcagatgccaatgctattaggcagattcccaaatttaataaaacatatttatacgatctgttcaggtattaccgataaatcaggattagtaaaaatattgctcagctatttaaatactaataataactttttagaatatcaattgttttggattggagcaatagttgaagactatctattaggtgtaggtgagtatggctccgttttacacaagttatatgagttatctggtgattttaaaattgccagagcaaaagtattagagataccggaacagggttttggtttcaaagaaataaggaatgaataccttagaaccggacaatcagattggttatcatggtcttcggctatcggtacgagaaatcttaaatcagcagagagaaactatattcttgattatttctcaaaaggctcaccaataaattatcttgttgcatcttgcgtcaagaaactttaatttaaaagccaccttcttgaaaggtggctttaaaaaatacctttagttcc

SEQ ID NO: 281 - DNA, 5526 bp, Citrobacter rodentium; identical to SEQ ID NO: 27

SEQ ID NO: 282 - DNA, 6689 bp, Pluralibacter gergoviae; identical to SEQ ID NO: 28

SEQ ID NO: 283 - DNA, 1981 bp, Escherichia coli
ttttagaaatattgtgtaaaacttcttactctttactggtcatccctcagtcgtggaaaaaacacactgttccatataggttttatttgtgatataatgaacaagttcttatttaagaaacctataaacattaagcgacggaaatatatcatgaaaatagtcagcaataccgtttgggatggacttaaactgcctgattatagggctcgtttttttatagaagtttggaaggagattttgtacgtcaacactccttcattttatcaatctaaaatgattaatacgatgtcaggtgccgaggagttagtcgaagccattgatgattacatacaagatgataagagtaaaaaaagcttattatcaatgatagaagattacaaaggtaatttaaaaaaagactctatagcaaaagacacttttaaaaacttgcatgcaacgctgttaaaaaaaattgagactgttcctgacccaatatctagtaattatattttagaattaaaaacaattgttaaattagtattatccaaagaaagtgactattatcacgaacttaaaaagcagctaaaatcatctattttgtctaacgctgatttgaataaaaaagcccgtttaatggactccatttatcaattaactaaaagctttattggctatctcctgtggaaggggtattcaccaacttatttatataatagaatggagtatcttacgagaattaaaaattatggcagtagagacttttccgctcaatttaatagttgccttgataaattaactattaggattcatgattatacagtttattttcttattacccctttgtctaaatatctgattgaattgaataatatccttgatgttagctttatcaatcgagaaggtattattaatgaaaaaaactacaataaaatttcacaaggggttgaatcttcggtattagccaaaattgttgttaatacaacagactacgtttccgcggcgtggcaggcaaatgaaaaactggataaagtcatagattatttagaaatagagaagccagaatataatattagatattctcctgtatgtcttacagagttttcaaatggtagattcacacaccgtcagactataaacataggcagattgaaacaattcattacaagtaaaaattacagcattcttgaaaatatacctaatgagtccaaggtactcttacgagagtctataaaactagacagatatgatgtactgacaagatctttaaggtatttaagagttgcaaaagaatcaacttcacttgagcaaaaattgctgggcgtatggatagctcttgaatgtattttcgagagcacatcaggtaatatcatttctggaataactaaccatatccctacgttctatagcactcaaagtctagaaattagaattagatattctaaagatttattagaagcccgattgaagcctatttcagatagccttttagagattacagccaatcagaaatctaaatttcgagacctttctttaaaagaatactttgacatagtgaaaatcgaaaaaaacaggaataaaattttcgatgagttagtttccaagggggatgagtttgccgtttttcgactaataaaaatatttgaatcattcggaacgtcaaagaaaataaatgatagatttaatgatactaaaaaggatgttgagtctcagctttatagaatttacaaggtaagaaataaaataacccatagagcatactacggaaatattaggccccaattagtggatcatctttatagctatttactaagtgcatatagcacactaatttatagtttaagatataatgcaataaataaatttgaaccacaagatatgtttaatgcatatattatctcgtgcgagagtttaatattcaatgttgaagaagaaaaaaaacttgaaaatataactatggatgaaataattttatcatagtgaatgttttctaggtgtcgtattc

SEQ ID NO: 284 - DNA, 7246 bp, Erwinia piriflorinigrans
atggtagcgataaaaatgtatccggcaaaggatggggatgcttttcttattatttgcgatgaggaaaaaagtgcatttctgattgacggaggctacgcggaaacgttcaggcaacatattttgcctgacttacgtgagctgagttttaacggttaccggttacgtctggtcatggcaacacatattgattcagatcacattggtggtctcgtggacttctttcttgtaaatggacacgcagcagagcctgcagtgattactgttgaccgcgtatggcacaacagcctcagggcgatgacgagacccgaaaataatgcacaaaaagtggattcccgagaaatcactgactttttgagacggagatatcatgtcgaagccgataaagccaaaccgcatgaaatcagcgcgcgtcaggggagttcactggctgccagccttctggctggcgattatcattggaatgagggaaaagggtatcagtgtatctgcaccggtacctccattcccaacttgatgtgcgataacagtctaacaattctgagcccctctaaggagagaatttcagcgctctgcctgtggtggcgcagacaacttgcatcgctgggcttttcgggacggtcctcctcgagtgaggcatttgatgatgctttcgaatttttttgtaaaagggaagcatctcaggttcctcttccgcatgtcatcaatgcaagaacaccgttgcttgagagggattatgcacgggatacctcgccaacaaatggcagttcgatagcgttcagtctggtgctcaataagaagagaatattgatgctaggagatgcctgggcggaagaagttgtgacatctctgggtgccagtggggcgtcccatcattttgatatcattaaaatctcacatcacggtagtattagaaacacaagcccgaatcttttaaagatcatagatgctcctgtgtacctgatctcaaccgacggaaaaaagcatgccagacaccctaacctggcggttctgaaagcgattgtggacagacctgcggcgtttacgcgaacgctctattttaactatgccaacagcgcatctgcttttatgaaaaattacctttctgcaagtggtgcacaattcagaatcattgaaggatcaacggattggataacactgtgagatatgctgctactgaaactgaaataaggaacgcaactgtactcattgaatgcgcgggttacactggttccggaaccctgatcgcagcagacaaggtccttacggctgcacattgtgtagtatcggatgatcctgagacaccaattacagtgacattttttggtgcggatgaagacgtctgtgtcaatgcgacaatttcagaaatagatacatcgtgcgatgcctgtctgctaacactttctgactctgtcgacattccgcctattacacttatgacacagccggagcgagagggaagccaatggaaagcctttggctatccggcatcacgcaatgggccatcacattatcttcatggcactataagtcagattttaccaaggcttttccatggcgttgatatggatttgtcggtcagtgccgattgtgttctggaagagtacagtggagtttctggtgccgccattctatcagaaaataaatgcattgcgatggtgcgcatcaggatggatggtggactaggtgcagtaagtcttgataagttaagcggtttgctgattcgaaacggcctcatcccagatgacattgcatccctgccagattcatcactgtcgggtgaagttgtcctgaaccgcacagaatttcgcgacaactttgaatcgttcgtcctggagcacaagggacgtgcagtgcttttggaaggtagtcccggctctggtaagactaccttctgccgccattatcagccccgtagtgagcaactcgcagtggcgggtgtctatgaatttacaccggaagacggtgctggtacgacattcaaaattcttcctgaggtatttgccgattggctgcataaccaggtttctatactgctttcaggtaggcctgctcgcagggaggaaacagaaaagatcaatctgacccaaaaggtgtctgaccttctacatactttctcagattactggaagcacaaaggaaaatatggcgtcattttcattgatgctgtgaatgaggcaagcgagtgcggggatgaggcagtatcgcgctttacagcattactgccggtgacacttccggagaacgtcaaacttgttttcaccgcaccatcattatcatcagctggtaaggctttccggcactggctcacacctcaggattgtatcagcctaacgcttttaagccatagggaggtgttacagctaacagctcgagagcttaaaacttccgccccttctttgtcactactcacacgagttagtgatatagctcagggccatccactttatctccgatacattcttgggtatctgaaagcgaatccggatcaggttaatctggagatattcccggttttcagtggcagcattgaaacctactacgaaaggctctggcaggggctggttaaggatgagagcgctgtaaatctgctcggtattctctcgcggatgcgctggggcattgatatttcatcactgatccctgttctaacaccgcaggaacagacggtgtttgttccaacccttgaccgtattcagcatctgcttcttaatgataaatcatcagcattgtgccaccaatcatttgcggcgtttatcaacagtaaaacggcggtaattaactcgctgctgcacggacgccttgccgacttctgccttaccagtggagagagttatggcctgattaatcgcgcttatcacctgctcctagcctctcacgacagacatcctgaagccgcattggtgtgcacgcaggaatgggctgacgcctgtatcgtcaagggggctcagccggatattctaattcacgatatccgtcagaccctgaagaacacgcttattcgtgccgatgcagtggcatcgattcgtctgttgctgcttttccaacgcatgaccttcagacaccattttttgtttctgcagtcagcttatcactcaggccttgccctggctgcacttggcagaccggatgaggcccttgagcagctcataccatctggaagcctcgttgttgatgcagttgatgcaattgtcagcgcacagactctcgcgcgtatgggaaacagtgaacacgcgctgaagctattggaaaaggtgaagtcagctgtcgaccaagaatttgaacgcaatcccgtcaatctatctgattttatcggcctttccctggcttgggtgagagctgagctgatggctggggtggttgatggccacggacgcacacgcgaggttgttgagtatttgtacggttgtgggcaagtcgttcgcgataattttgaacaatcagcgcatagtaaatcagcatatacacgcgctttttatcctcttcaggcagaaatggaagccgtgaacatagcctttaatgaccgctccgtatctttacggacggttaaagaaaagtttggtagcttaccggaaaatattcttgatctgatgctcagttcagttatgcgggcacatgacatcattctgcaacatcagttgccgatgccccagcatgctttgcaacccgtttggtacaatctggacagattacttcatactgatattccgtattcgaacgaaattcgttttaattcattaagtagccttatttttttcaatgcgccttctgctcttattatcaggatggcgggggtattttctttcgaagtagtacccgaaataacgttgctcaatgaagaaaatgagatagcagcagacagcattgacgttagtgaacagggacaactctggctggtgagcgcctaccttaatgaaacgcaaccctgtcccgatattaaacatccgagtcagggatgttctgaatggctcaagacattgactgaggctattttttggtacagcgggcaggcgcgccgggcagttattgacggcaacgatgagaaaaaagaactgcttttagtcaaggtgcagaatgatattctccctgctctttcgtactcgctggaagagcgcatggcatggccgaattcatgggcaatgcctgaacagattatccccatgatttacgaagagttagtaaacatgttcggcgcatgctggcccgataagatatcagtgatcactgatttcattctggctcatacgcctcagcaatgtggactttattccgaggggtacaggcgtttactgaacagagttattcagactcttctaaatgagcatcggtttttggggcaatctgatacgacatttcaactacttgagacgttgcatgcgtttgtttctgcttttactgagaatcggcaggagctggttcctgaattactgaatattattccagcttatattagccttgatgctcctcagctggcacaggacacttacactgagcttttaggtgtgtcgatgggccctgactggtacaaagaagaccaatttgccctcatgacaactatgctgcgcgtgataccacagcatacagacacaaatactacactttcacaagttgcaggattccttgaacatgcttcgggtgaaatgacatttaggcgttatgttaggcaggaaaaatcacagtttattggcgaacttattcgtcgtgggaattatgcacacgggtttaactattatcgtcagcagtcctgcggatcccatgaggaaatgctcacccaacttagccacccagctgcagatagccctcatccattgaaaggcatgcggttcccggggggagcgctggatgaggaacatgctgtagaatgcattgtcagtgaactgcgaaacagagtcgactggcggcttcgctggggacttcttgaaatattcagctttggcagtattggtaatcttgcagtgccctttgctgaacttatcaatgaattttctgcagacactgaagaccttaatgaaatacccaaaaggttgcacaacattttacatggtgatgtgcctttctcagaacacagaaattttatcaaaaatttcacagagcaccttgcagacaaccataagccactctttgctgaatttatcagtttgctatccgaagacactagcgataacgacgttaagcctcccccctctggtgatgctaaccagaagggtactgatacctcagatgatgtggcaatgcagccaggactttttgggaagcgttctgcgatcaatagggctgaagcctgcatggaaaatgcccgaaaagccgcagcacgcagaaacacagttcgtgcaagtgagttagccgttgaaagcctgcatataattcaggatggtgactggtcagtctggagaaagaacaaccatctggcggaacttacacggacgtacatattggacaactctgcggatgcaggttcggtcattcgtgcttatgcttcgcttgtagaaaaagaacgttatgccccggcatgggtaattgctagtcatctcatcgaaatagcagccagtaaattctctgatcaagaagcccaagctattaaccagatcgtacttgaacacaaccgccacatgcttgggaataccgaagcggatgctgcgcatttttcttttcttaatgaacctgatacctcagatgcaggtgaagaaacactctattttctgttttggctgctggaacacccactgaaattcagacgcgaacgggctctggaagtactgaagtggcttgcatcagacgatgataagattctgggccaatgcgtgacggaggcactcgtttcagacattgcctcacgagctgaagcactaatggcattgacagactgggtgtcagctagatctcctcagcgaatatgggactttatagttaaagagcgcagcctttttgaatggcttgaaggcactactgcactaagccaagtccatctcctggagcgagtaaccagcagagcgggatttgttttaagaaatgagattgccgcatttgagcgaccccgaaagcttttactgacatcagaagcctctggacaacggaatattccagaaaatttaccaacatgggtgcaatccttgtcgcagacccttgccgtgatggaaaagcagggaatagatatcccagctttgcttaccttactcgaaaaacgggttttacagcagagtggattggctgatatcacggtggcttttgagctggaaaagttacttgcgcgtggttttactgtgaatagaacaccaagtcaccatcgctgggagacgatggtgcgatttgcattaaaccagatcatacatgaggcggccgcacaggatgaactgcaaaacattgaacccttgctacgtgcctggaaccccgcgtcagaggagtgtgttgagccgtgggaggtttgtaaccgggcaaaacagattatctgcgctgttatggaaggtagacatcagcaagcttcgggcatagaggatggctttttcttgcattatcttgatgaagtggaggtttcccgagaaggtcaaacgcatctggtggaaatctcagcggtgttaacgacagctcataatggtcatgagagccttagaccaggtgcagaaagcgaatttaatgcaacacagacacctgatatagagcggacgcttagtgtgcaccttacatgccagcgagtcaaaatgcagcctttgctttttgggggagctacgcctgccgcagtgtcgaaaaagtttatgcagatgactggaacgttgccttcagactttattcgcaggcaatggcgaagcgggcgttctcttagtaaaaacagatggggggaaccaataagcagaggaagtctgttactcatgaaaagaacaactaccctccctccaggactgggcttagcgtggtatgtcactgtcgatgggaagttgatgaatatattttcatatgccccgaggaggagataatgaaatacagttcaatggaaacgccaaaaacgcgagaggaatttgaggctcgctgttttcacctgctcaatgcgatcaagttaggacggtatcatggcattccgggtgaaggtaacaaagagcaggttccttttctccctaacggacgagttgatctggcaaacattgataccatgactcgcctctcgatgaactcgttatatgatttccactataacagggataattatccgcagtttgatctctctgaaaatgacgagaatgaagaggctacggattga

SEQ ID NO: 285 - DNA, 5109 bp, Escherichia coli; identical to SEQ ID NO: 46

SEQ ID NO: 286 - DNA, 7175 bp, Salmonella enterica; identical to SEQ ID NO: 44

SEQ ID NO: 287 - DNA, 4964 bp, Escherichia coli; identical to SEQ ID NO: 48

SEQ ID NO: 288 - DNA, 3411 bp, Escherichia coli; identical to SEQ ID NO: 58

SEQ ID NO: 289 - DNA, 4212 bp, Escherichia coli; identical to SEQ ID NO: 56

SEQ ID NO: 290 - DNA, 4329 bp, Cronobacter sakazakii; identical to SEQ ID NO: 57

SEQ ID NO: 291 - DNA, 3308 bp, Escherichia coli; identical to SEQ ID NO: 65

SEQ ID NO: 292 - DNA, 3419 bp, Escherichia coli; identical to SEQ ID NO: 66

SEQ ID NO: 293 - DNA, 4415 bp, Escherichia coli; identical to SEQ ID NO: 29

SEQ ID NO: 294 - DNA, 5408 bp, Escherichia coli; identical to SEQ ID NO: 32

SEQ ID NO: 295 - DNA, 5958 bp, Escherichia coli; identical to SEQ ID NO: 36

SEQ ID NO: 296 - DNA, 9416 bp, Salmonella enterica
atgatgaagatcacctaaaatgataggttgtttttatacagtaccaaattcaattttctctctataagatagattgcatttccgcggatgtagtttacaagggaaagacggtcaacatgcatcgcactatttctgagttttatcgcattccccctttacttattcgggcgctaaaaagtggaatttcctccgtggtggagtttcatctcaacaggggattacccaaagattcacgagattctctgggaaacagcccattgatgattgcggcccagtatggacatttcgctatttgcgaaatgttgttgagtgcgggtgttgatgttgaacatcaaaacaacctcgggcttcgcgctagtgaccttgcgcaggagcaaaaattgcgtgatctgttggcccgttatcgtcagcctctttcacttgccgaactggaacgctctgtggtttcagtcgaggactcagaaacagaggcagaattacccagcgctgaaatcccgatggattttatgctgtgggatgcagaagttgaattgaagcccgccgaagataatctgacgttaagacatgcttccgctgaagcccagcaattattatcacgctatcgcccgaaagataactctgctgagtggagcgatatcgaactcacgctccctgaaccactgacgccagtttctcactctccgcaaaattaccctcatctctcaacgttgctcattggcgcactggatacggggcgtatctctttgcgtgacatctggcatgccggggaagaggatttcggtatgcagtggcctgaattccggctcagcgtagaggcattgatcagggacttaccgctgattgtggatgacgatgatattattccgcctgacgctgctccggcgacattatcggtgagtgaacctcttgaaccctggtttgatgctttcaatgcattgcggcagttcggcatcgttgaaaactatctcgtggatatccgccagtgggatgtcgtggataaaacaaaagaagaacgactcggccagcgcatggatacggcgctaattaatctgataagaatcctggcgggtttatccgaagcggaatatatgcagttgctgcagcccaattaccttccggagccagcgcctgagatttctgaagaggaagacgtcgcagaagaagcggatgaggaaatgcctcccgtatccgatgacgatgacgataacgatgacactatcagctttatcgagcttcttgttctgctgagaagtgggaaagcaggcgagtatcaggataatcatatcccccgcccggagtatgccgacctgcaacagatagttgagcgcgcccgaacgcttatccctgatgaaggtcataaaataagtctgtatgtcagcagttacagagaggcttgggaggggctgatccacgccaacttgcgtctggtcgtcaccatcgcgaataaatatcgcgggcggggattagatgtcgaggacctgatccaggaaggtaatctgggtttgatcaaggccgttgaaaaattcgactatcgacgcggatttaaattctccacgtatgccacctggtggatccgccagaagatcagccgcgcgattgccgatcaggcgcagctcatccgtttacccgttcacttctatgagcaattcaggcgctggcgaaacagtcgggatcaattgctgtatcgccaggggataacgcccacgatcaaacggctgcaagcattgactgaccttccagaaaatcaactcaagcggatggcaaaatatgaagaacagacggtgttgattggcgattttcatgatgacgcccaggacagcgaagcggcgctgtcgggagacgcgatcctgaccggaaaggatttcaccagtgctcccgttcagtctctcgagctaagagaatgtgtttcattggtgctggaaacgttgttgccacgcgaaaaacagatcataaaaatgcgttttggcatcggtatgacgcaagatttcacgctggaagaggtgggtaaacagtttgatgtcacgcgagaaaggatacgtcagatagaagccaaagcgctccgtaagctccgctatcacagccgggcgtcgaaattaggcggcttcgtcgaacagtgggaaaccgcgttgagcgagatgcaggaagaagaagaatgacgaccatgcgccatgcgccaccgaatgcagccattatgatcgaagcgctgcgagggctcggttacaacactgccaccgcactggctgacatcatcgacaacagcattagtgccggtgcccgtaaggtcgatctgacctttcactggcgtgagtcggatagctatatcgtggttcgggataatggttgcggcatgtcggccgctgaactggatgttgcgatgcggctgggggtcaaaaacccgctgacaaagcgttcaggacacgatctgggccgcttcggtctgggactcaaaaccgcctccttttcgcaatgtcgccgtctgacggtcgcctccaaaaaagaggagataacgaccatcctgcggtgggatctggacattctcgccgccagtacggacgacggttggtatttgcttgaaggcgctgacccaggaagtcaggaggcgttagcaaatgaggaacctgactcccacggtacggtggtgctgtgggacgttttagaccgaattgtcacccccggctacggtgagaaagatttcctcaatctgatggatggcgttgaacaacatctggcgatggtatttcaccgattccttgaggggaacgctccccgactcactctcaccctcaatggtcgcaaaattaaagcttgggatccctttctcagcgggcatccttccaagccctggcattcgccttcggcaatggcgccaggcgctcctgccgtgaaggtggagtgtcatgttctgccgcatcaggatcacctgacgacgcaggagtatcaacaggctcaaggaccggcaggctggacggcccagcaaggattttatgtataccggaatgagcgattgctggtggcgggcaactggcttggactcggaagcccccgggcctggacgaaagatgaaacccaccgccttgcgcgaatccgtctggatatccctaatgatgccgacatagactggaagattgatattcgtaagtcgatggcccgcccaccggtttcgctgcggccttggttaacccaactggcgcaatcaacgcgtgatcgtgcggtacggacatttgcaaaacgcgggaaaatgaataagcgcaagcccggcgaggaacttgttcagctctggcaagcgcagaagacgccatccggtgttcgttatcagatttcgttacaacatcctgttatcagcaatgtcctttcgcaggccggtgagttatctccacaaattcaggccatgctaagactgattgaggaaaccgttccagttcagcaaatctggcttgatacggctgagacaaaagagacgccgcggacaggttttgaaactgcaccgcccgcagaggtgttgtccgtattgcaggtgatgtaccagactatggttggacagcaggcgatgtcaccggcgctggcgaaacagcacctgcaaaatatggaacccttcgataattatcccgaattaattgcactactccccgacgatcaacatgagaaatcgctatgagtcttaatcccttggatgacacgcaactgagtgtattgcagattgtgcaaacgttcctgcaaagtcaggataaaagcacgatcacgcccggtattctgcgccaacatattgatatggtttgtcagatgaaacctgagtggagccgccttgatagtcgggagatcctggtcgaagagttgatccgccgttacagcatctggatgggagaagattcttctctgagtaatgacgaagggcatcaaccctggctgaccgctgatgcgaaacgcgagtggcgctactggcatcgatatcgccagtggcttggcaaaacgatgccttggggagtcctggatacccttgaccgttcaacggatcgtgttctgggattacttgagcaaccggggcgggaagggcgttgggaccgacgtgggctggtggtcggccatgttcagtcggggaagaccagccactataccggtctaatctgtaaagccgcggatgcgggatataagataatcattgtgctcgctggtttgcataacaacctccgctcgcagacccaaatgcgtcttgatgaaggatttcttggttacgagacgagcccactcagagaaaaagtgaccatcattggggtgggcgctattgatagcgatcctgtcattcgtcccaactacgtcactaaccgatctgaaaagggcgacttcagcgccggagtggctaagaatctggggatcagccccgagcaacggccctggctgttcgtagtaaagaaaaataagtctattttgaagcgcctgcatacctggattgagaaccatgttgccaccagcgttgaccccatcaccggaaagcgttttgtttcggaattaccgctgctgatgattgatgatgaagcggataacgcctcagttgatactggggaaatcgtctacgatgacgatggaaaaccggatgctgaacatcagccaacggcaataaatagtctgattcgtaagctgttgatgcagtttagccgtaaggcgtatgtcggatataccgctacgccctttgccaatatttttattcacgagagcaatgaaacacgtgacgaaggtccggatttgttcccttccgcctttatcattaatctcggcgcaccctctaactacatcggccctgcgagggtatttgggcgggccaccgcggaaggccggagcggagagtttcctttgattaggcgagtgagtgatcactgtagcgatgacggaaaaagggggtggatgccggtttctcataagagttcgcactatcccacactggatacgctaactcatttcccggactcgttaaaacacgctatcgacagttttttactagcatgctgtgtcagagaattacgcggtcagggagagaaacacagttcgatgctggtccatgtgactcgcttcaataaggtgcaatcggttgtttatgaaaatattgatgcctacattcaggacgtgaggcagcgactgacgcgaaggattggacacgaaccttttttacatcagcttgagtcactctggcaggccgattttttgccgacgaatcaggcgatccgcgaagttatgccgcagcaggttccggacgacgccttcgaatggcaggagatcgtcgacaagctgtataccgtgatagaaaacgtgtcggtacgaatgataaacggaacggcgaaggatgcgcttgattattcggacagtgcgacaggcttaaaagtcattgcgattggcggagacaaactggctcgagggctaacgcttgagggattatgcactagttattttttacgcgcctcccgcatgtatgacacgttaatgcagatggggcgttggtttggttatcgccagggatatctggatgtatgccggctttataccaccgatgagctgattgaatggtttgagcacattgcggatgcgtcagaagagctgcgggaagagtttgacaatatggtcgccagcggcggcaccccacgtgatttcgggctaaaagtgaaatcacaccctgtgttaatggtgacctcgcccttaaaaatgcgtagcgcgcgttcactatggctctctttcagcggcacagtggtcgaaacgatttcgttgtttaaagaacaggagtatcacaagcgtaactacgtggctttccagcgtctaaccgggcgcgtcggtgctggcgcgccgatacctgagagacgacgcggagataagattgaaaaatggaatggggtcatttggcaaaatatctcccctgagccgatcatcgatttcttaacggaatatgagacccatgctcaggccagaaaagctaacagcaaactactggcggattttgttacgcggatgaatcgcgttgatgaactcacccaatggacggtggcggtgatagggggtggcatcgatcgccatcacgatgtttgcggcttttccgtaccgcttatgatgcgtaaagcgtctgaaggggtcactgaccgttattccattggccgtttactttccccacgcgatgaagggattgactgtgatgaatcaacttggcttgctgcgctggaagaaacgcagcgtatttttcatgccgatcccggacgcaatgaagggcgagaggagcccgtcgttccaggtggcgtggtactgcgtcggattaaaggatttggcattaacgacattccagcacagcgtcaaaaaggtttattgctcatttacttactggacccgcagcaggcattgtcggcagcggaatatcaggaagatgccttacctgtggtggcttttggcatcagttttccgggaagccgcagtggggtaacggtggagtacaaagtgaacaacgtactatgggagcaagagtatggtgcggctgagtaaagacgatctgctggcggcctggaaagccttagatcgatctcagatagacgaactgcctggcgctcagggctggcgcgggattcggctttttacgcaccagggctgtagctttcatgccgggcgtcgtcagcctgataatgaagaaatgctgattgccgtgtttcctcatcctctttcgcctgggtcggcggcgctgccatcttgtaaaggattccgcgttgagatggccggaacagaggagggggggcagaacggtttgatgatccgtcgccagcaaacagggaatgtggatgtctttacgacgatgattctggatattctccattcgctcctgaacgtttcgaaaccgcgcctgtttgaaactctgcttcgtcggattcgtttatggcaggcgtttatggagcgcgatacccgtccactcagtcaagaagaagaagttgggttaatcggcgaattgacgtgtctggagcggttgatcgagagcggtcttgctccgtcaacggcagtcgaagcatggataggaccgcagcatgggctacaggattttgcactcgatgaacgcgccattgagataaaaagcactacggcagcgaagggtttttgcataactatccactctcttgaacaactggactggcagcgggcaggatcgcttgtattgtgtggtttgcgcttcagcgagcatcccaccggcgcaaccctgaatgacatcattagccgtcttcgtcaacggtttgagggaaacgctacggcggcttgtatttttgagggatcactttgtcatgtcggatatttcactgaacatgctgaattctatacacgtcatttcttgctgacagaggcgttcgcactccccattgaagcggattttccctctttgacgcatgccaatgtcccgttgccggtggtgagtgcgcgctatcaactcgaactccagacacttattcctcaggcccaagattttaaccattgcttgtcagactttgcaggattaccgcatggaaattattgattttttacgtcaaacccagaatgagattcgcaaggaatatcaggatcaaatggctcagccaggggttgagtcgccttttccggagctgatttttaccgatattgttatgcgtcatatggccgatatcggcatgacattcgatgatgccgagacgtgtcactttatggcgaaagtcagtggacacaatgtgcgtctcagcggttatgccttctcagaagatggcgatcaacttgacctttttgtcagtatttatcacggtagcgacgagctctgtcacgtcccggatgctgagacaaaagcgattgccggccactgcattcaatttttgcagaagtgcgttgacggtaaattatcatccacgctcgatcagtccaatgatgcctggcaactggtgacgaccatcgaacagtcctatgcggaactggagcaaatcagaatttatgtactgaccgatggtcaggtgaaaacccgctggtatcagtcacgggacgtggccggtaaaaccattaaattagaggttatggacattgtccgtttgtttaaccactggcaggaaggtaagccacgcgatgaactgcaggttaattttgatgaggtggctgggggggcgcttccctgtgtctggatcccggatgaaatgggtgagtacgattatgcgctgacggtggttccgggagagacactgcgatttatctatgaaaaatatggcaaccggattctggaagcgaacgttcgctcgtttctgagtcagacggggaaagtcaacaaggggattcgtgacactttacgtgagcagcctgagcgttttatggcttataacaacggcattgtgattgttgccgatcaggtcaggcttggtgaagcaccgggaggtggccctggtattgcgtggatgcaggggatgcagatcgtcaacggtgggcagacgacggcttccatgtttttcaccaaaaagaaatttccggcaaccaatctgcgtaacgtgcgtgtacccgcaaaagtaattgtgctgaaacagacgaataatgcacaagaagagatgttaattgcggatatttcgcgcttctcaaatagccagaataaagtcaatatttccgatctgtcagccaatcgaccagtacatgtacagctggaaaaaatggcaaacacggtgtattgcccggacggatacagtcgttggttttacgagcgagcaaatggcagttataaggttatgctggaacgagaaggtaaaacaccggcgggcattaaacggttaaaagacgcaattcctccatcccgtcggataacgaaaacggatttcgcaaaatatcactgtgcctggctccagcgtccggatttagtcagcctcggtgggcagaaaaactttgccgcattaatgacgatgattgacaaggatactgagcgttatggggatgaactgaacattgaaacttttaaaaattacattgcacaggctattatttataaaaaagcctataagttgattaattcacttttccccgcatttaaggcgaatatcgccgcctatactgttgccgcctattcacatctttatggtaacaaaacggatctggcagagatctggaatcaacagggtatcgaggaaactatggggaatcgtcttgtcagcttggctcaccgagtaaatagccttctgactgaatcggcaaatggcaggatgatttctgaatgggcgaaaaagccggagtgctgggactacgtgcgcagtaaaatctatttctccgcacagggaaaaaaggatgacttctcgcatggtgaaattgcatgatgagttcagtatcaacatgatatgtgagtattactgacgtatggcagcggttgttttgtatggatgtgctatggcatcgcatcaatatacaattaacagctg

SEQ ID NO: 297 - DNA, 3605 bp, Citrobacter gillenii; identical to SEQ ID NO: 51

SEQ ID NO: 298 - DNA, 4100 bp, Salmonella enterica; identical to SEQ ID NO: 75

SEQ ID NO: 299 - DNA, 3066 bp, Escherichia coli; identical to SEQ ID NO: 61

SEQ ID NO: 300 - DNA, 3676 bp, Escherichia coli; identical to SEQ ID NO: 34

SEQ ID NO: 301 - DNA, 9809 bp, Escherichia coli; identical to SEQ ID NO: 73

SEQ ID NO: 302 - protein, 201 aa, Escherichia coli; identical to SEQ ID NO: 150

SEQ ID NO: 303 - protein, 200 aa, Escherichia coli; identical to SEQ ID NO: 151

SEQ ID NO: 304 - protein, 1213 aa, Escherichia coli; identical to SEQ ID NO: 152

SEQ ID NO: 305 - protein, 1201 aa, Escherichia coli; identical to SEQ ID NO: 153

SEQ ID NO: 306 - protein, 865 aa, Escherichia coli; identical to SEQ ID NO: 154

SEQ ID NO: 307 - protein, 694 aa, Escherichia coli; identical to SEQ ID NO: 155

SEQ ID NO: 308 - protein, 404 aa, Escherichia coli; identical to SEQ ID NO: 156

SEQ ID NO: 309 - protein, 548 aa, Escherichia coli; identical to SEQ ID NO: 157

SEQ ID NO: 310 - protein, 627 aa, Escherichia coli; identical to SEQ ID NO: 158

SEQ ID NO: 311 - protein, 347 aa, Escherichia coli; identical to SEQ ID NO: 159

SEQ ID NO: 312 - protein, 1836 aa, Escherichia coli; identical to SEQ ID NO: 160

SEQ ID NO: 313 - protein, 515 aa, Escherichia coli; identical to SEQ ID NO: 161

SEQ ID NO: 314 - protein, 542 aa, Shigella dysenteriae; identical to SEQ ID NO: 162

SEQ ID NO: 315 - protein, 586 aa, Escherichia coli; identical to SEQ ID NO: 163

SEQ ID NO: 316 - protein, 307 aa, Escherichia coli; identical to SEQ ID NO: 164

SEQ ID NO: 317 - protein, 320 aa, Escherichia coli; identical to SEQ ID NO: 165

SEQ ID NO: 318 - protein, 311 aa, Escherichia coli; identical to SEQ ID NO: 210

SEQ ID NO: 319 - protein, 550 aa, Escherichia coli; identical to SEQ ID NO: 211

SEQ ID NO: 320 - protein, 216 aa, Escherichia coli; identical to SEQ ID NO: 212

SEQ ID NO: 321 - protein, 1232 aa, Klebsiella pneumoniae; identical to SEQ ID NO: 169

SEQ ID NO: 322 - protein, 144 aa, Klebsiella pneumoniae; identical to SEQ ID NO: 170

SEQ ID NO: 323 - protein, 425 aa, Salmonella enterica; identical to SEQ ID NO: 166

SEQ ID NO: 324 - protein, 398 aa, Escherichia coli; identical to SEQ ID NO: 171

SEQ ID NO: 325 - protein, 667 aa, Escherichia coli; identical to SEQ ID NO: 172

SEQ ID NO: 326 - protein, 540 aa, Escherichia coli; identical to SEQ ID NO: 167

SEQ ID NO: 327 - protein, 494 aa, Escherichia coli; identical to SEQ ID NO: 168

SEQ ID NO: 328 - protein, 851 aa, Citrobacter rodentium; identical to SEQ ID NO: 173

SEQ ID NO: 329 - protein, 856 aa, Citrobacter rodentium; identical to SEQ ID NO: 174

SEQ ID NO: 330 - protein, 907 aa, Pluralibacter gergoviae
MNTIYIPLDSGESAVLKDPDTLLPRNIYEQLTRFIEKAVNEVPKPHEALNETRSHKAISIDGARGTGKTSVLVNLNDYLQSNAQQLAGKIHILDPIDPTLLEDGESLFLHIIVAAVLHDKEIKTAQSRDLDKSRVFTQKLENLAHGLESVDLQQNQRGMDKIRSLYGSKHLANCVEEFLKSALELIGKKLLILPIDDVDTSLNRAFENLEILRRYLTSPYVLPVVSGDRRLYDEVCWRDFHGRLNKDSAYNRKNTYDIARDLAIEYQRKILPLPRRLSMPDVSDYWQQDGIEVTLDKNGIPLRNFMAWLKIFITGPVNGLEGSDLPLPIPSIRALTQFINHCRDLIRELPEPFRKKVSTLALRRMWQMPDVPLDVLESFAEKHRELSKEAKREYGEAYKLFYDGLKNFTAWDSKAYLEDDKQSAWLDRLCEYFRFEPKAGAVFLTLQAKQFWVSWAQGDNRNQSILATPLFQPLLHNFREYDVFERYDDLSDWESQLRTRLPESWLTAIKGQKTLLPYPVAEAGINTSLKWRYWEELENYGFDPALESKANFLLSTLMQRNFYTNSKQSVVINIGRVFEIIIASLVSDLELADLQRIRQRSPFYSASALAPTKTLDLEEDFTKKNTRFMNNRSETDRDISDDILVDVPDKNEDAWKKICDEINHWRKTHNVASTNLSPWLVYKVFNKTYSQVANNVFVPSGMQNVDAALNVFGRVFYAVWSAFGSFEKGELFGLSDVVATTNIISAKNFYNHDNFRVNVGPFTPEQNQNSDSDREAYQHRKMYGEKTRAVSYVLATHPLKKWIDEVLRTEFKQKQNAQIQTERKMPIQAEKIIDISPAREFITRKLSLNSHSRLVKTRIIKQLKMLYPNYDKAKDFIDEVTNHFPQNDPAINTLQKAFAELYPDGDK

SEQ ID NO: 331 - protein, 914 aa, Pluralibacter gergoviae
MLTRSLSEHAAGCFFTDERLSQRFLDILLSPPKDFETWSSLQEESFKLLVKSIDSRYPRTYRLTDVRQLVGNICDNGLLTSPTLPWLDVIADQLLLRNGDLLYYRENKVQDYVRIAAELDPALLVGWRLGDWLLQSPPPRLTDITRVVMAQNPFFAPPANAGKPFAEGHVHLGGVTAGDTILDGYLFEEIELPKSKDMLLWAHKEHDELTPLINRAKSLLTVLLSAPPQTVSEQTQNGFDQRKTVSEKYKALQNPMDSIHRLPDWLLLAKKNRGTESVSPGWFLNQLAHASEKKHPSRWLWLQLYLCHSYQLKDTHPLERTAILCFWLTVNALRRHIIMDGQGLACFTERYFNGALRAGKKADSSNMRYLFAGKDDVAEVKASPKAFDHEMVTGFSSTLLKTLGIPAVFPPYIFGEHEIKPDERVLRYIGALERWQFCGHFSRSKTASRGKRAKADLQANWTEAERLLQKLYSHNGWNHPVFLGGKRNPHFHFQPSNWFRGLDVAGDENVLKIAGFAPMLRWLRSGLYPVPEGLRASMSFHFSIHAGEDYAHPASGLRHIDETVRFCEMREGDRLGHALALGIEPALWAKRHGEMILPLDEHLDNLVWQWHYATLLSASLPLAQAVLPLLERRIARFIARCEWCKKRPPQIDNSVVGKQACSDDKPLENITPDTLYRAWLLRRNCSYRLQQLHGGSPLTSQEKCALPDWATLSDKGNVAAQLYQQRHSSLLDDMPPQLVVVRVADEWGTQELIGLGNPGKLRQQALDGKDILQDIDTPVELQFMHALQDYLLDHYDRKGLIIETNPTSNVYIARFKKHVEHPIFRWNPPDEELLKPGAEFNRYGLRRGPVRVLVNTDDPGIMPTTLRTEFLLLREAAIERGVSRTMAEYWLERLRLYGLEQFQRNHLNVFEVIE

SEQ ID NO: 332 - protein, 245 aa, Pluralibacter gergoviae
MSGTFPYLQYTDVNGLQPKLKEELKNLRRKEYLSYWPRFLIRRISLYALPFLMFFTFFFCLSLTKKVGAEEVTNILGTVSISFSSCLLLGIIISGVVLLLQWTCFNCKYSPQDTNGVVGARKLNYKLLAHVVFVIACVLLFVFIYCTNNKVFYGFIVFLGLTLLPLVIDRTLGVTRQNERHKLYIRRLERLDELNILREKMNIKFEESHFIEYMKLVDEADHGKNQDTVSDTSYFMTLIENKLKV

SEQ ID NO: 333 - protein, 601 aa, Escherichia coli
MKIVSNTVWDGLKLPDYRARFFIEVWKEILYVNTPSFYQSKMINTMSGAEELVEAIDDYIQDDKSKKSLLSMIEDYKGNLKKDSIAKDTFKNLHATLLKKIETVPDPISSNYILELKTIVKLVLSKESDYYHELKKQLKSSILSNADLNKKARLMDSIYQLTKSFIGYLLWKGYSPTYLYNRMEYLTRIKNYGSRDFSAQFNSCLDKLTIRIHDYTVYFLITPLSKYLIELNNILDVSFINREGIINEKNYNKISQGVESSVLAKIVVNTTDYVSAAWQANEKLDKVIDYLEIEKPEYNIRYSPVCLTEFSNGRFTHRQTINIGRLKQFITSKNYSILENIPNESKVLLRESIKLDRYDVLTRSLRYLRVAKESTSLEQKLLGVWIALECIFESTSGNIISGITNHIPTFYSTQSLEIRIRYSKDLLEARLKPISDSLLEITANQKSKFRDLSLKEYFDIVKIEKNRNKIFDELVSKGDEFAVFRLIKIFESFGTSKKINDRFNDTKKDVESQLYRIYKVRNKITHRAYYGNIRPQLVDHLYSYLLSAYSTLIYSLRYNAINKFEPQDMFNAYIISCESLIFNVEEEKKLENITMDEIILS

SEQ ID NO: 334 - protein, 386 aa, Erwinia piriflorinigrans; identical to SEQ ID NO: 183

SEQ ID NO: 335 - protein, 1935 aa, Erwinia piriflorinigrans; identical to SEQ ID NO: 184

SEQ ID NO: 336 - protein, 93 aa, Erwinia piriflorinigrans; identical to SEQ ID NO: 185

SEQ ID NO: 337 - protein, 1484 aa, Escherichia coli; identical to SEQ ID NO: 188

SEQ ID NO: 338 - protein, 2092 aa, Salmonella enterica; identical to SEQ ID NO: 186

SEQ ID NO: 339 - protein, 207 aa, Salmonella enterica; identical to SEQ ID NO: 187

SEQ ID NO: 340 - protein, 1587 aa, Escherichia coli; identical to SEQ ID NO: 189

SEQ ID NO: 341 - protein, 769 aa, Escherichia coli [sequence omitted]

SEQ ID NO: 342 - protein, 1275 aa, Escherichia coli; identical to SEQ ID NO: 191

SEQ ID NO: 343 - protein, 1207 aa, Cronobacter sakazakii; identical to SEQ ID NO: 192

SEQ ID NO: 344 - protein, 415 aa, Escherichia coli; identical to SEQ ID NO: 193

SEQ ID NO: 345 - protein, 610 aa, Escherichia coli; identical to SEQ ID NO: 194

SEQ ID NO: 346 - protein, 394 aa, Escherichia coli; identical to SEQ ID NO: 195

SEQ ID NO: 347 - protein, 571 aa, Escherichia coli; identical to SEQ ID NO: 196

SEQ ID NO: 348 - protein, 1273 aa, Escherichia coli; identical to SEQ ID NO: 175

SEQ ID NO: 349 - protein, 643 aa, Escherichia coli; identical to SEQ ID NO: 176

SEQ ID NO: 350 - protein, 274 aa, Escherichia coli [sequence omitted]

SEQ ID NO: 351 - protein, 457 aa, Escherichia coli; identical to SEQ ID NO: 178

SEQ ID NO: 352 - protein, 263 aa, Escherichia coli; identical to SEQ ID NO: 179

SEQ ID NO: 353 - protein, 1911 aa, Escherichia coli; identical to SEQ ID NO: 180

SEQ ID NO: 354 - protein, 679 aa, Salmonella enterica
MHRTISEFYRIPPLLIRALKSGISSVVEFHLNRGLPKDSRDSLGNSPLMIAAQYGHFAICEMLLSAGVDVEHQNNLGLRASDLAQEQKLRDLLARYRQPLSLAELERSVVSVEDSETEAELPSAEIPMDFMLWDAEVELKPAEDNLTLRHASAEAQQLLSRYRPKDNSAEWSDIELTLPEPLTPVSHSPQNYPHLSTLLIGALDTGRISLRDIWHAGEEDFGMQWPEFRLSVEALIRDLPLIVDDDDIIPPDAAPATLSVSEPLEPWFDAFNALRQFGIVENYLVDIRQWDVVDKTKEERLGQRMDTALINLIRILAGLSEAEYMQLLQPNYLPEPAPEISEEEDVAEEADEEMPPVSDDDDDNDDTISFIELLVLLRSGKAGEYQDNHIPRPEYADLQQIVERARTLIPDEGHKISLYVSSYREAWEGLIHANLRLVVTIANKYRGRGLDVEDLIQEGNLGLIKAVEKFDYRRGFKFSTYATWWIRQKISRAIADQAQLIRLPVHFYEQFRRWRNSRDQLLYRQGITPTIKRLQALTDLPENQLKRMAKYEEQTVLIGDFHDDAQDSEAALSGDAILTGKDFTSAPVQSLELRECVSLVLETLLPREKQIIKMRFGIGMTQDFTLEEVGKQFDVTRERIRQIEAKALRKLRYHSRASKLGGFVEQWETALSEMQEEEE

SEQ ID NO: 355 - protein, 500 aa, Salmonella enterica
MTTMRHAPPNAAIMIEALRGLGYNTATALADIIDNSISAGARKVDLTFHWRESDSYIVVRDNGCGMSAAELDVAMRLGVKNPLTKRSGHDLGRFGLGLKTASFSQCRRLTVASKKEEITTILRWDLDILAASTDDGWYLLEGADPGSQEALANEEPDSHGTVVLWDVLDRIVTPGYGEKDFLNLMDGVEQHLAMVFHRFLEGNAPRLTLTLNGRKIKAWDPFLSGHPSKPWHSPSAMAPGAPAVKVECHVLPHQDHLTTQEYQQAQGPAGWTAQQGFYVYRNERLLVAGNWLGLGSPRAWTKDETHRLARIRLDIPNDADIDWKIDIRKSMARPPVSLRPWLTQLAQSTRDRAVRTFAKRGKMNKRKPGEELVQLWQAQKTPSGVRYQISLQHPVISNVLSQAGELSPQIQAMLRLIEETVPVQQIWLDTAETKETPRTGFETAPPAEVLSVLQVMYQTMVGQQAMSPALAKQHLQNMEPFDNYPELIALLPDDQHEKSL

SEQ ID NO: 356 - protein, 952 aa, Salmonella enterica
MSLNPLDDTQLSVLQIVQTFLQSQDKSTITPGILRQHIDMVCQMKPEWSRLDSREILVEELIRRYSIWMGEDSSLSNDEGHQPWLTADAKREWRYWHRYRQWLGKTMPWGVLDTLDRSTDRVLGLLEQPGREGRWDRRGLVVGHVQSGKTSHYTGLICKAADAGYKIIIVLAGLHNNLRSQTQMRLDEGFLGYETSPLREKVTIIGVGAIDSDPVIRPNYVTNRSEKGDFSAGVAKNLGISPEQRPWLFVVKKNKSILKRLHTWIENHVATSVDPITGKRFVSELPLLMIDDEADNASVDTGEIVYDDDGKPDAEHQPTAINSLIRKLLMQFSRKAYVGYTATPFANIFIHESNETRDEGPDLFPSAFIINLGAPSNYIGPARVFGRATAEGRSGEFPLIRRVSDHCSDDGKRGWMPVSHKSSHYPTLDTLTHFPDSLKHAIDSFLLACCVRELRGQGEKHSSMLVHVTRFNKVQSVVYENIDAYIQDVRQRLTRRIGHEPFLHQLESLWQADFLPTNQAIREVMPQQVPDDAFEWQEIVDKLYTVIENVSVRMINGTAKDALDYSDSATGLKVIAIGGDKLARGLTLEGLCTSYFLRASRMYDTLMQMGRWFGYRQGYLDVCRLYTTDELIEWFEHIADASEELREEFDNMVASGGTPRDFGLKVKSHPVLMVTSPLKMRSARSLWLSFSGTVVETISLFKEQEYHKRNYVAFQRLTGRVGAGAPIPERRRGDKIEKWNGVIWQNISPEPIIDFLTEYETHAQARKANSKLLADFVTRMNRVDELTQWTVAVIGGGIDRHHDVCGFSVPLMMRKASEGVTDRYSIGRLLSPRDEGIDCDESTWLAALEETQRIFHADPGRNEGREEPVVPGGVVLRRIKGFGINDIPAQRQKGLLLIYLLDPQQALSAAEYQEDALPVVAFGISFPGSRSGVTVEYKVNNVLWEQEYGAAE

SEQ ID NO: 357 - protein, 342 aa, Salmonella enterica
MVRLSKDDLLAAWKALDRSQIDELPGAQGWRGIRLFTHQGCSFHAGRRQPDNEEMLIAVFPHPLSPGSAALPSCKGFRVEMAGTEEGGQNGLMIRRQQTGNVDVFTTMILDILHSLLNVSKPRLFETLLRRIRLWQAFMERDTRPLSQEEEVGLIGELTCLERLIESGLAPSTAVEAWIGPQHGLQDFALDERAIEIKSTTAAKGFCITIHSLEQLDWQRAGSLVLCGLRFSEHPTGATLNDIISRLRQRFEGNATAACIFEGSLCHVGYFTEHAEFYTRHFLLTEAFALPIEADFPSLTHANVPLPVVSARYQLELQTLIPQAQDFNHCLSDFAGLPHGNY

SEQ ID NO: 358 - protein, 601 aa, Salmonella enterica
MEIIDFLRQTQNEIRKEYQDQMAQPGVESPFPELIFTDIVMRHMADIGMTFDDAETCHFMAKVSGHNVRLSGYAFSEDGDQLDLFVSIYHGSDELCHVPDAETKAIAGHCIQFLQKCVDGKLSSTLDQSNDAWQLVTTIEQSYAELEQIRIYVLTDGQVKTRWYQSRDVAGKTIKLEVMDIVRLFNHWQEGKPRDELQVNFDEVAGGALPCVWIPDEMGEYDYALTVVPGETLRFIYEKYGNRILEANVRSFLSQTGKVNKGIRDTLREQPERFMAYNNGIVIVADQVRLGEAPGGGPGIAWMQGMQIVNGGQTTASMFFTKKKFPATNLRNVRVPAKVIVLKQTNNAQEEMLIADISRFSNSQNKVNISDLSANRPVHVQLEKMANTVYCPDGYSRWFYERANGSYKVMLEREGKTPAGIKRLKDAIPPSRRITKTDFAKYHCAWLQRPDLVSLGGQKNFAALMTMIDKDTERYGDELNIETFKNYIAQAIIYKKAYKLINSLFPAFKANIAAYTVAAYSHLYGNKTDLAEIWNQQGIEETMGNRLVSLAHRVNSLLTESANGRMISEWAKKPECWDYVRSKIYFSAQGKKDDFSHGEIA

SEQ ID NO: 359 - protein, 277 aa, Citrobacter gillenii; identical to SEQ ID NO: 197

SEQ ID NO: 360 - protein, 239 aa, Citrobacter gillenii; identical to SEQ ID NO: 198

SEQ ID NO: 361 - protein, 561 aa, Citrobacter gillenii; identical to SEQ ID NO: 199

SEQ ID NO: 362 - protein, 1272 aa, Salmonella enterica [sequence omitted]

SEQ ID NO: 363 - protein, 891 aa, Escherichia coli; identical to SEQ ID NO: 200

SEQ ID NO: 364 - protein, 384 aa, Escherichia coli; identical to SEQ ID NO: 202

SEQ ID NO: 365 - protein, 754 aa, Escherichia coli; identical to SEQ ID NO: 203

SEQ ID NO: 366 - protein, 1022 aa, Escherichia coli; identical to SEQ ID NO: 204

SEQ ID NO: 367 - protein, 195 aa, Escherichia coli; identical to SEQ ID NO: 205

SEQ ID NO: 368 - protein, 945 aa, Escherichia coli; identical to SEQ ID NO: 206

SEQ ID NO: 369 - protein, 907 aa, Escherichia coli; identical to SEQ ID NO: 207

SEQ ID NO: 370 - DNA, 2393 bp, Escherichia coli; identical to SEQ ID NO: 18

SEQ ID NO: 371 - DNA, 2569 bp, Escherichia coli; identical to SEQ ID NO: 20

SEQ ID NO: 372 - DNA, 4154 bp, Escherichia coli; identical to SEQ ID NO: 13

SEQ ID NO: 373 - DNA, 3648 bp, Escherichia coli; identical to SEQ ID NO: 24

SEQ ID NO: 374 - DNA, 3818 bp, Salmonella enterica
agatacagtctccatcatactcagaggcgcataccccttacatatctcaggtttatctggcttaggctatgacgctaacccactagagaatcggagaaaagtaaagactgtttgatttgtgagcttgattgattgcaatttaagcgctcgacacagggcaggatgccaaacaccttcaacagagaggtcggtagctccagcatatgcaagctaacgttgctttggaacttcaactaagtaccaagagtggacggttccttagtatcaggcaagtatatgattgcacctagcggtgtaaagagttataaaaaagcataaaacgttgtattgtgagactttaatgaaccggcagccatttacttcatcagcacttaaacgtaatttaagcgaaagtgagaaagcctattattttagcaaaggaaatagcgaaaaattagaatcattaattaacgatgcagtattaattgccaatgaaaattttcgttctggagtcagtgtcaaaaaattaaacatcaaggggcgttgtgtttattccgcatcgaatttaaaagaaaaattaatactgaggcattgcaattccaatctgaagtgtctggaatcacttttgcctaaacaaagaaataaaataattgatgaattgaagctttatcttagagaaggcacacagtttagggtttatcggctagatataaagtctttttttgagtccatccagttgccccagctttttaaatatatgcatgatgagtcgagactatccaggcatactaaaaacctgctagaatggtatcttaaagcttgtgagcgtattcatgccacacaaggcttacctagagggcttgaaattagtccaatgctatctgaattatatttgtcagagtttgatcgcaatatcaatcgacatccagaagtattttattactccaggtttgtagatgacatggtgattatttcaagtgggaatgaagaccaaaagacctttatgaaacaggtagtggatttccttcctaacggtttgaaactaaataaaaacaagctaaacatatcccctttaattcctaaaagaagtaaaggggataataataatgataaattactccataaatttgatttccttggttattcttttgcagttatagatacaccattagcaaagaatacagtaaacatcatatatagaaagataattattgacctatcaagcggtcgattgaaaaaaataaaaacaagaatatcaagagccttttatgcatttaagaataatggtgattataagctattactagacaggatttcttttctaactagcaatagagatttaaacagaaaaattaaatcactgagttcaactgagaagaccaaaattagcaccggaatatattatagcaacgctcggcttgacgaaaactccaagacactaaagcaactggataactttttaatttattgtgtaatgtcaaatagagggcgtttgaatagtgttgccaagcattctttaagtataaaccaaagaaaggaattattgcgaaataattttacgaaaggtttttctgcaagaatttataggaaatataattttcaacgttatacagagattactaaaatatggctctaaaaaagaatattaaacttgataaaaaggattataccagagctttgttgtgtgatacccaaccagcagactgtccgattattttctcaaatgatgggctttatgctaatttggcatattttgatgttaactataaaacatcaacagattttactcctctttcatctttcttaaaaaaaataattaacccatcgttggacttgtctattacggttgatgaaagagagcagaaaaggaaaaaacagagcttccctttcggttactgtattgttaaagattcttttagcttgagacgtctttctttaattcatccgagatctcaacttaattattgtgagttttacaaaaattattcatcagttataacctacaattcatcaaagagtaattattcaataagatatcctaagaaagttgccaattcattctttttatatgagaagaatggagcggaaagatataaaggggaggatattgaaactactgaggatgaattaatgaggaagtactcttcttcatatttttcgtatggtggtttcaatagaatatataaattattccaaagtaaatctttctttgaacttgaaaaaagattctctataatgtggatgctggatgtatcacattgttttgatagtatctatactcactcagtgtcgtgggctttaaaaaataaagcttacattcgcaagcatgtaactaacagtaatcagtttggtcaagaattagatacattgatgcagcgaagtaataataatgaaacaaatggcatcccaataggctctgaatttagtagaatatttgccgaattgatcttccaacgaatcgacaataatattgagttggatcttatggatgagcatgggtggaaaaataaaaaagactatgtgatattaaggtatgttgatgattttattgtgttttgcaataatgaatcgaatgcagaaataatttctaaaactattaatgtgaaattaaatgagtttaatctccaactaaataaaaataaattcaaaaaatattcaagaccattctgcactagcaaaacaggacttattatcaaagttaatgagttaattcaaaatttggaatcaaaattatacgaaaagcatgacggcaatattgttcttaataagataagaaataagcatgatttgaaagtatatatgattaataacattaagtctatatgcttagatagtcaggcttcttattcagatgtatcgtcctatttgttatcctcactgtctaaaagattaatagcacttatccatcacttttcttttgagaaaaataaagatgaagaatttaaaaaaatcaaagatgtaatatttacactatctgatttaatgttattcttttttagcgttaatccaacagtatcatcctcgtacaaattatctaaatcaatgatcattattaatgattatttgaaagggatttcaagtgattatagtaatatttttatgacatcattggtaaatactgctgaaaatatcaattttggtgataatgacaatggattatttatagatgattttatatccattgaaaaggtcaatttaattttggcagcaacgttttttggggataaccacctggtaagtgaatctttttttgatgggattttgcaccaaaagaaattagattactttacaatcatatccttattattctatttcaggaatagaaattcatttcaggcacttaagagtatagttgaaagaaaaattatagaattactatgtccagatatggatttgttacagtcttcggagaaggcacatttatttttggatgtaatgtcttgtccatttgtatcaataaaaacaagaagatttatatatataagatatctaaagtcttttgagccaaaaaatctaagaacccactctgagattgagaatgatttgcaatcaatgctccaatgctactggtttgtcaagtgggatgagttagatcttttaaagatgatagagaaaaaagaattgaaggaaacttattgatctgataaaacattaatgtggtcagtttcgaaatacttacgcattattggtaagataaaatcttatgttaccaataatgtgatttcgctagatttggaatcggcttaactgcttaaacttatgctaacagaattgcttaagacctaaccattctttggaatgagatggggcttccaggtccagttgagagtagtcactta

SEQ ID NO: 375 - DNA, 4236 bp, Acinetobacter calcoaceticus; identical to SEQ ID NO: 25

SEQ ID NO: 376 - DNA, 1951 bp, Escherichia coli; identical to SEQ ID NO: 22

SEQ ID NO: 377 - DNA, 5533 bp, Escherichia coli; identical to SEQ ID NO: 26

SEQ ID NO: 378 - DNA, 4781 bp, Escherichia coli; identical to SEQ ID NO: 47

SEQ ID NO: 379 - DNA, 4037 bp, Escherichia coli; identical to SEQ ID NO: 30

SEQ ID NO: 380 - DNA, 4891 bp, Escherichia coli; identical to SEQ ID NO: 31

SEQ ID NO: 381 - DNA, 6502 bp, Citrobacter braakii; identical to SEQ ID NO: 37

SEQ ID NO: 382 - DNA, 3678 bp, Escherichia coli; identical to SEQ ID NO: 33

SEQ ID NO: 383 - DNA, 3917 bp, Escherichia coli; identical to SEQ ID NO: 35

SEQ ID NO: 384 - DNA, 2009 bp, Proteus mirabilis; identical to SEQ ID NO: 10

SEQ ID NO: 385 - DNA, 1946 bp, Yersinia aleksiciae
ctttaaaatgtttcatacagcatacttgtataaaaaaaactttatgctataaagacataagtggcggcctttgagtttaactttcctacgactatctgcgtaggtcatttttcaacggcagttttgcactctaagtttgccgataagtttgtcgcgcagctggcaatagagaaaacatggccgccactcttccatataaggatttttatgccctcattttcattaaaagaatgtaatgacgtttggaaattatgtgatttactgggagttaacttcgaaaatctatctaaaaaagtatatccaagtaataataggttatatagatgtttctttattccaaagaaatctggtggactaagagaaatatactgccctattaaatcacttaagaacttacaaaagaaaataaaaatagagctagaaaaagaaataaaatacagatcgcctgcacatggatttattaaagggaaaagtataataacaaatgctgaacaacatataggaaaaactatagtacttaacttagacctcgaagattttttcaaaaatatacattttggcagaataaaaaaattatttgaatcaagcccattaaatttaaaacactctgtatcaactttccttgctcatatctgttgtagaggtggtgtattaatagctggttcgccaacatctccgattatatcaaatatgatttgttataaattagatggtcaacttcaacgtttagctaaaaaaaaccactgtacatacaccagatatgcagatgatataacattctcttttacttgctcagaaagaaagttgccgagagggatcgtacatatagatgaaagttcattattaggttttaaattaggcgatgagttatctgaaattatttcaagtaacaacttcactctaaatgaatctaaaataagattaagtcgaaaatcacaacgtcaagaagtaacgggtttaatagtaaattcaaaagtaaacgtaaaaagagacttcattcgcagaacatcatctatgattcatgctctaaaaattcatggtgctgaagacgcagaaaaagaacattatttaaaatataaaaaaacttatataccagaaagacaaaataaaagacaaaaggataaacctggagatctatacacaaaagtaatcaaagggagactaaactatcttagaatggttagaggtgaggattgtaacttgtggcgtaaacttatgtatgattttactgttgcaatgaagaatccagatgagtcttataaacgaacatggttagacgatgcggcagagtctactgtgatatttaacacttacgatgggtgcggcagtggttttttaataaatcatgatatcaaaaaatatcccaatggactcattattactaattatcacgtgattcctgagataaatagtgataatatttcaaacattgaagttcatacatggatgaatccttctaaaggatttttattacttaaatttgtagcttcaagtaaagacttagatattgctatattaactgcggacataccatttccagttagtaagtttttggttgtaaattcatgtcctaactatagacctggaattaaaattcataccataggatatccagattattcatctggagaggatccaacttttatatctacaaaaattaaaggtaaaactacatatcatggtcaattgagatatcagatcatagatgaaataaaacatgggaatagcggaggccctgtctttgattcagatagaaaagtcataggcattgtgtctaatggaaacgaaaaaggtgcaccaaaaaacaataagagtagcttcataccaatcgagaccttgcttgattttataaattgtcaaaagtaaatgttttaaaaaaaccatacattgataactatatttttacacagtaaaaaacaccataatcttatatggatatcagatta

SEQ ID NO: 386 - DNA, 2032 bp, Yersinia bercovieri
aagaaaaaggaatcttctaaattaatgaaactataattatacgaatcagtaataccacagttattgacatattttgtaataagctttatttttactaaagcacagtacatcatacaaatttaattttctactgacttatcagcggtagccataaacgtgtatcttctgcctcagctatcctacagtttcttgtggattgtcgtcattgcaaaagagaaaactagatgatgtattgtgctcccctttttaaaggactcgcatacaatgtttgacccattcaaagtagcgccgccaaaattgaaactacatcaatgtgtagacgttcatgagctttctgcaatattaggaacgaactacaatcagttatcaaaattaatatatcctaccactcaaaattcttattattgtttcagtattgataaaatgaacgggaacaagcgagttataaatgcacccaaaaataaattaaagtcgatacaaagacgattagcatatttacttaatgagtattatcctgtcagggatgttgctcatggttttattaaaaataaaagtattgtgtcaaatgcagaacagcatgttcttaaaaactgcgtattcaatatagatttagaaaacttctttggtcagatccatttcgggcgtatacgtaatttattattttcaccgccatttaacttttcaacttcggtatcaacagtaatttcacatatttgctgtagtgatggttttcttcctcaaggtgcaccaacatctcctataatatctaatttaatatgttataaattagataatgaacttaggcgattggccgtttatcataaatgtacttatacaagatatgtagatgatataacattctcttttacatgcaaagcaaatagaataccatcacaaatagttgtatcttcaggaaatacggtaacgccaggtaatgagataaatgcaataataacaaggaatggtttctctataaacgacaaaaaaaccagactgcaacaaaagaatgaaaggcaaatagttactgggatagtggtaaataaacggacaaatgttcaacggagttttgtccgaaaaacaaactcaatgctgtatgcatgggaaaaatttggagctatcttagctgaaaaggattactttgataaatacaatagcaagattaaaactataaaactaaaagatttcattgataatccgggagagttatttaagagtatcgtaaaaggaaggataaactatataaaaatggttagagggaaagatgatgtaatatatagaaaattcgcccataggatatcttgtttattcggcaagtttgataataggtatcttaaaacaccgtatgattttgctattgaatctacatttgtactcgaaaatagatgtgatgactcacaaggtactgcatttttactagagagaatagggttggttacaaaccatcatgtcgtagaagatatctgtgatatcacagatgagtttattgacttattcttatggaatgaaataggcaatattcgaaagacaaaattcataatgtcaaacaaactgtttgatattgccgttttcgaaagaacatccgacttcgacaatataacaccattaaaaattggtgatgatagtggaataaaaaatggtactgttattacagtaattggtttcccacaatattctcctggtgaaagcgcttatgtgaatacaggaaaggtaattcaatcgaaaactatgtatggtaataaattttggcttattgatatacctgttattcatggaaatagtggtgggccagtattaaatgacaaatttgaagttataggtattgctagcatcggtacagcgaagaacgatagttcatctaaacttcatgggttcattcccatatcgactttattaagatatacgggtgaagataagccttaatctctctttctctaagtgatttttaaagcgcctacagtccatactgtctggcgtttttttttgttaccggtcatacgtgccattctgatgctgagaatatgacattgggcat

SEQ ID NO: 387 - DNA, 1996 bp, Yersinia enterocolitica
ttacattactatataatatgcaattaaaatgaataatttatactattgacatattttgtaatacgctatattttttaacggcacagcgcattttatcacaatttaactttctactgactatctgcggtagccataaacatgtaacttctgcatcggccgactttccgtatctcgcatgtttgccgaatttgcaaaagagaaaatagataaagtgcactgtgccctatttaaaggaatgataataaaatgtttaatccaaccaatatattaccaccaaaaataaaattaaataaatgtggtgatgtacatatattagctgcgttatttaatttaacttatgaagatctatctaaattaatttatccaactccaaatagatcctattatcaatttgctatcgataaaaaaaatggtagtaaacgggtgattagcgctcccaaaaagaaattaaaaatcgttcaaaaaaagatagcagatgaattacttacactttatcctattcgtgatgtttctcatggttttattaaaggaaaaagtattgtttctaatgcggaaaaacatgttcttaaaagttgcgtacttaatatagatctcgaagatttctttggaagtatacatttcggaagagtaagaaatttgttaacttcaccttcatttaatatacccttacctgtagcaacagtgatttccaatatatgttgttataacggatccattccacaaggagcacctacatctcctattatttccaatttaatatgttataagttagataatgaattacgacaactcgctggtaaatataattgcacctatacgagatatgtcgatgatataacattctcattcacatataaagccaaaagaataccatatcaactagttacctctgatgccaacataataaatataggagttgaattagaggaaataataactagaaatggtttttcaattaacaaaaacaaaactagattacagagtaaaaatgaaagacaaactgtcacaggaatagttgtaaataagaaaactaatttacagcgaaaattcatacggcaaacctcatccatgttgtatgcatgggaaaaacatggcgtagtagctgctgaaaatgaacactttgttaaatataacaaaaaaaataagctaataaaattaagggatttcgtagataaaccaggagagttgttcaaaagaatagtaaaaggtcgaataaattatataaaaatggttagaggtgaagacgatataatatatcgtaaatttgctcacagaatatcttgtttatttggcaatgtaaataatagatatttgaaaactccatctgattttgctattgattcgatttttatcttagaaaatgaggtggatatatcacaaggtacagctttcctcttagaggatgttggtattgtaactaattatcatgttgttccaagtatagatgaatataatgatattgacttatctctttttcgatataatgaattggataataaaagaaaagtaaagttcataatgtcaaataagttatacgacttggcgatattcgatactaatggcaattttgatgatataaagaaattttccataggggatgattctaatttaaaggtaggttcagaaatatctgttattggcttcccacaatataccacgggagagtacccttatataaataccggtaaaatagtccaatctaaagctcttttcaataataaaatctggcttgttgatatacctattattcatggaaatagtggtggtccagtttttaatgagaaatttgaaattattggcgttgcctcaaatgggacggagagaaatgatcagtcatcaaagttacatggcttcataccaatatcaacactaataaaatttattagcagtaaatgattttaatattaaagtgataagcgcccctgttacgcacacagagaggcgcttttttatttcacctctcatgatgaatcgtttcgagccaaaaaggcagagt

SEQ ID NO: 388 - DNA, 3679 bp, Escherichia coli; identical to SEQ ID NO: 15

SEQ ID NO: 389 - DNA, 3479 bp, Klebsiella pneumoniae; identical to SEQ ID NO: 16

SEQ ID NO: 390 - DNA, 7494 bp, Pseudomonas rhizosphaerae
atgccccgtatcaacgttgagaaactgctgcttgagatcgaaatcgacaaggtggcagagcgattgggtatggcgcttaggagcgaatcagctacgcgcaagctcacgctgtgcccgttccatgacgataaaactccttcccttctaattgatacgagcagagataattctggacagcattaccactgctttgcctgcggtgaacatggagatgcaatcgatctggtgaagggagttcttcatatcgatttcaaaggtgcattagagtggctgtcaccaaactctactaccacccctgtaaatagggcgagaaaacagaaggctatgcagcctgagcagccagaaggctcagggcttgcgcaagcttataagttatacctgttaagcaatgacaagcaacgactagctaactgggtgactgatcgcaagcttgatatttttttgatggaagatgcaggattcatatacgcacacaaaaactcactatctaaacaggtttcctcaagaaaagattttggaacgaagcgtgaattagcagcaacattggaagaagcgaacctaatacgcaaaatccttccaagctcggggttccaaaactactatttaaatctacagtcaatccacgacaacaactatatagactttttttcaggggatcgaatcgtattcccgataagagacgatcagaaaaaactactaggccttgccgcccgggcggtagatgagcaaccagcaaaatacctattctcaaaaaactttccaaaatccaaagctatttttagaatagagcaagctacaaccactctacgagcattggctaagcgaggcgaaacagatctacgcttatatatctgcgaaggattttttgacgctctaagattggaaagcttgggatttcctgcagtagcagtaatgggaacatcaattagcaaagaacaaattaagattatgaaagggcttagcgacacgctcccttcaaagctagcctctttgacaatctgtatttgttttgatcgcgatgaagcgggattaagaggagcatccgaggctgtactaaaattcttaggcgctaatctcgacgtggtatttgtatggcctactactgctcagcttacaagcgcagaccattcaaacacaagcataaaagatcctgacgaatatttgagaaatttgtccgcgccgcaggccaagtcacttatcgatgtttccacctatggacctgtagtagcagtactagcaaatcagtttggtgtgcatgccgacgaactgcttgaaaatctaaagtggaacagtgccagtcgctctcgaaaatacaggtcatttgagaaaactcgtgctgaactcaggaaagttgtagccaacccccatctccaatcaagcgacctttttttaaatggccgaacagatcttgactcggcggctcaaatagaatggattgattttttaagtgtcgacattgcgactgaagccgctccatcggaatgttatcttaccaactcaggcaccagactaaaccacgcccgactgctcgcctatatgggctcacgaagaggagagttgccctgcgaagaatcaaaatgggagcggttagatattgcggcaagtgcattcaatgtgttgctcgctgaacgattggctaatgaaatacatggacccatcgacccgttcgaggccgtatgggtgccgaggtccttcggcgcagaagagccgagattaaaggtgatgcctcaacctgaggatttaatagcgcatcagtacttactaaatgagctacttacagaacgctgggatgcttccgctctcggtgttacagcattcagccagtgcataccagctgtccgctattaccgcgaagaaagaaaaactgttacgacaggaatatctaccccctcagataacacccaacctattatacttgaacagacgctaagtttcgcctatcaaattgatatggaggttattgagggcaggcagccagcttcagatcagggaatgtttcgtccgttcctagactgctggcgagactttatgcagtcccttaaaaatcaagccaaatctataaattacgtgcatgttatccgcctcgatgtcagtcgatattacgaccgcatccgcagacacgtcgtaagagacagcattcaaccatttatacaacaagctctggaaactgtcgctgataatgcaccggcgtttgctgaactgatgaaaatacaagcatctgcggatgaagcagcggacaaatccgcaataattgtcgagcaattatgcgacatgctctttggctacccataccttagccctgataacgggagaattaataaatcagatcccttacgcggtattcctcaaggcccagtaatctcagcatggttaggctcagtggctttgtttccagtagatctcgcggcactggaaatgatgaacaaatacaatgtagacggggaaactcatctagggtatgcaaggtatgtagatgacatagttttactagctagcagctccgtacttcttgaggaactgagagagctagttgatcaaaaaactcggagcttagacctggcgttggtcgcgaaagctgacgctattccgccaatgtctgctgaggaatttgcagattatgcaaatcaagggcgagctttagaagcatctggtccagcgtgggaaccaccgttggctggcgatggtgaagcggggtgggagttttggtcaggcactcccccctcagatagacaatctgccctgcaactgctatcaaattgggagatatacaaaagcccaatagaaataatcttgcaaacagtgaaaacgtccttcctagctatggatttacgttctagcgagcttgcaaagggagcaaggctaatatggtacgttgtagcatccgacctcctctcagctgacattgatccaagcgatgcggcagatttagcgtgggaaatttatgatcgctattggaaggaatgtactgaggagtgtgggtggcagttaaacccggatagtttcggatgggaggcaccgaatctgttcgcacttgagggactggaaaagcttatagatcataaaaatagcctccaatcgggtttaactgctttagaaaataccgttcggcacaaacgcatctctttcctagctagaaccgtgcttggggagcggttcaaactgcatgctcttgaaagcagctctacgcttaagcaccagatagataaaagactagatctcctcgaatggaaagcgtcaaaatcgtgcggaatgcccgttcgtagaactaaatcctacgcagagcgatcaatgtatattcgctcctggcaacccttcaactggttccatgccgcagtagaagatttcatgctcgcggatcagtccagcggatccgacccattgagttcatatgtcactcagttccaatctatagaaaagagcatcagacctaatcacgccgcttcttatgagttcttccggtatttactgccatccgatggcagcgatagcgatcttgagtttttctcaaaaacagagaatcgatactccggcttagcaattcagattttggttgcattagtccctcgggaaagcataatacagattctctcaaatagagcgcgcttactttgtcctctagaagctggtaaaaaactattagtcatgccccctcttcctggcgtcaatcagcaacgtatagttgcttgccagatcgatagctcctcagaaaacaaaatcaaaaaaatcagctcgtttgagtgctatgaaatagattcaactaaaaccaataccacatctctagacttttttggtgcaaactctgcgggcgtagttgtgcttacacccacatggaacaccgaagcccaacctcaatccgccatacttcgatcaaactcagaagtcccgaaaaatcttttgttggaggtatttgagaaaccgtcaaccggtttcccttccgctattcagggattgaagcacgtagcctcactatatagagccattgtggtaataatggctgaatacgagaggcaaaatgatggtttagagcttatacccgcttggccataccttgccacagatatgacctctgggaactgctacctaatttgtgagggcgtaacgaaaggagaagtaggaaaccgagcatttgtaagagacggtgggcgggccctaagaaccattgagataccgatatacgaagcccagttgtggcgagccggggttgcgctaagcgattacataggcctgcacgacgatattgctaaatttagctcctccgaatccgaaatacctttggatgcgacaacgcttgccgccccgtcacagtacgtgctacgaagccaacttcgtaaactgaggggtgcctttgctaactcacaaatagggcggcgcgttatgcccccaagttttcttccggcaagtgttgaacgtgcgcttgagttattggagcattttccggaagactcagatagtacaaagatgcagctaatgcatctgcttgccactgaaaccgaaactgcgggaatgcgcgtccgctatgagaaaaatattgaggtcacagagctcacggtatttctacgtgcggtcgccgacagggttctaacgaaactacccttaagcataggtgaggtcattgctgcaccgactacagcagtcagtggcctgaggagagacctgagtggggtcttgacccttgccagaagcatatggtcgatggatgaagaagaaaaactctctccaatttttgcgtggaagatttttcgagctggaattgtaggtattggtatcgctgttgctctacgggggattatagcttcactaagaagccacggggggtttgcacgctttgagggatttgattttccagcggaatgggagcttccccctgccacagcagttttatccgaaccggcgacaacagataaaaccactgatgaaaatgtaagcctcctcgaccatttccgggtactcgtatcacatctcggacaccgaatgaggttggacgacaacggcgagccacaaatcccagaagaaatcagcacagaaataagaaaatacgctacagcattagcgggcctcactactaaagactcaactgcggtggacgcaagcgactggcctttctttgatatcagcgaaaaagtttttgataccctaaatatagaattattagagaacgtcagcaatctaatcaaaaacttagattccgcgcttggtctccaggtaattttggttacgcaacaatcatacggcttcaatgctcaaaccaaacgcttcactgactcaagaggacttgcatgggatataaagccatggatgatctcgcaatacccattgcgtgctcgccacgttgaggagtgttttgatcaagaccgtagaatcgtacgtgtatggagcgagatttacgaaaaaaacagtcaacgcctgctttctatatcagtactaggcgagcctttcgcatcaattgcactatgtaaggacttggaatcgccttatgccgagactaaaaatgtagacagcaagcacaacactgtattaggtcctagcgagcagggttctgaaagcgcacccatagatatttcaccgattcttgaaactgctgagcctgaggccgagactgccttagcagacacacaattaataccaaccccaaaccaaactagcactgaagacagctttgataaaatagatactgagcgtaatacaacacacaataaaaaactaccgcttaccgacgcaacactcaacgcccgaaagaattcatttagaaatagccagctaacagcctggagcgataggaagtccaataaaaaccctgcccatgttcgggtagctctatttcagtgggaccaagagctgagctatgcacaccctatggtggaggccaccccacaaaaatggcctttcagttccgtctgtaaaccagcagttttaaaagaacttaaacgcctatataactctccctatcaagcccttttgaatgcaactgaatctgccggtcaacaccacctatggaaaaacgaaaatatttccctacccagctggggtgagcttcgtcgtcggcgattattgctcaacgcagtgaacgcatgccagtcatttggcgtggacttattgatacttcctgaatactcagtccgtgcagaaactgttaagtggttaaaagaagagtgcttacccggaaagacggtagcggttttagcaggaacatttttagctttcgactccggtccgccccccctaaaacaaagcgcgagcctcaacctcttgtggcccgtaccgcgtgatattgccgaatgcctcaaaccgcttgcacccaaaacaaatgaagatgctatgtccttgagtgacaagattgacaagggcattgtattgcaatggggcagatcaaagaaataccgatcagtagctctaaatgagttcatccggcctggaactgatcctctcacccccctgttcatgcccggaaaaataatagatgaattgagacgtgcaaattgggatctggacgctgatggtgttgttaagttgctagccaacacagagttgccacttgcgaatttcatggagctgatatgctctgagattttcctgttcacgagcccaaccaacattccagagatggcaagagattatgtttcaatgtgtgcaagatttggcttcggcgctgcagaagctcaagtctgggcggatctcaaactactatctaaatggctttcggtctgttccaagcctggtggtgccgactctagacgatcaattttgatcgtacctgccgcgaccactcgtactgctgattattggatagcaggccaagctggcttgcttgccgccggcactacaactgtatttatcaatggcgtaggatctgggcttaagggtggcagttgttttattggcagagagagctggaaaacaggggctggttctcacggttacattgagaccattacgccataccatggctggtcaaaaggaatttactataatagcaaacatgacccactgagcgaaattgatcaagcattggtgatcgcagatatcgatcctcataacatgcttgaaggcaaacctagacctcagatgctgccagttcccttacagctagtggcatacctaccaatcgttgaaactgtcgacgaaacaagcttggaccaaactctctgtgacgcagttcaggttgaccataacaatattgcaagaattaatcagggtcagcgattgggtggacgacttaaaagtcgaaatgagttctggcaacttatcacgcaaagtataaataatgatgtcgacaacgactttatcattaacttcagtaaatactttactgatgggaaagcgattcttgagcgagcaaactctttcttcaacaatggacaccaacagcctttttcatcggtagttaagctagacctgctctgctctccggcactttacgactggctagaggccgatatgacgttgcgggagggtgaggcgttacccaacatctcagtcccttcatggaccaaataa

SEQ ID NO: 391 - DNA, 7656 bp, Vogesella indigofera
atggatcggtttgacattggtgaggtacttgcgaagtcgcctttagatgaagtagtacggcgcctcggcatcgagaccgagaggcggggaaaccaactcagtgcaatctgcccatttcaccaagacactcgaccgtcgctgcgtttttttccagcggacagcagatctcccgagcattttcattgttttgcgtgtggcgcacacggccatgcgatcgacttagttaagcaagtccaaagtgtagatttcttgccggcggtgcaatggctttcgcagagctttggcatcaaagacatccggcgacagccaaagaatcagccagatcgcaaaggcgccatcgaaggcgcacaggcattcgcgcttcggatatttgatgagcaccacgatacacaacgattccggacttggtgcgaagagcgagccttcgaggctgatttcctgtaccgccagggggtgcgctgtgtgcctcactcggttctcgtgcaagagttggcgtcgagaagcacaggcgagcgtgttgagctgatcgatggcctgcttgctctcggcctgattaagcgcttgcaacaagcatcccattcggatcagtacaagcttagctttccagatcaattccaattgcagttccaagactacttccacgacgggcgtgttttgatcccgatctatggtggtgccgcaaagcgaccggaactggttggcttcgcgggacgggcactgctggctgtgccgccagaaggagtccccaaatacttgttaagcccagggtttcaaaaagccaaatacctgttcaatgcgccgagtgccttttcgtcagcaacgggggaactgagggacggcgacactgcaacgttatatctcgtggagggcttcctagatgccctacgcctgcaggcgttaggcttgaacgcagtggcgcttatgggcacctcactcagcaatgggcagttagagctgctgaagcacttcgttgatggcctgccacagggcaaggctgagtttgtacttagcatcttcctcgacaacgataaagctgggtttgcagggacggatcggttggtgcgacgcctgctgggtttgtccggagttgatctgcgctggattggccttgatggctataccaaccgtccgcttggcaaggatccggacacttgtctaaaagtgctttcgagccgagtggaggcaacggactggttgcaggacttcaatcggccggccgaggcagccttgctggtatccgaattgggagacattgatgcctccgaactgccgaacgaacgctgggctgaactgaattccagtgctcgggagcgggcggtgtacaagactgcgacgactattcgacaggttcgtggctcgcggcctttacagggcgtgattcagcgactgaaggctacagaagagagttgggctaccgaactttgtgaattgctgggtaccgttgaaggaacacagcggaatcggagttccgtgttgtttctccagggcttggaagagcgcctctctcatgcccgaaatttggcgtatcacggatcgcgccgtggcgagctcccatgcgatgaagaatcttggctgactttggatttgagtgcgcgcctgtttgatcgcattgcccaacaacgattggcagagcgtggctggatccaagccgccccatatgatgcagtccacctgccgcgcaagcttacggctaatactacggtactggatgacccgcgtcgcaaggttatgccacacccggccgatttgcacttgcaacagttgctgctgaatgaactgctgacgcagcggcacgacttgctgagtgtcgaaggcaagaccttctcggaatggattcctgctgttcgctggttttctgccacccgcaaagtcgaagtgactgggccgtttgacgacctccccgctgcagaaggggaggagaccacattgagttttggctaccaagtagatatggatgtgctggagggcagcaagaccccgtcagaccaaggcatgttcaggccctacgggcagtgttggcgcgacttcatgagcagtttgagcaggcagtgccacgctatcggcggtcgagtgcatgtgcttcgactggacgcccagcgctactacgactccattcagcgttatgtggtacgcgatgcactactggactcgatcaaaggggctttgacgggaaccggggcgggcatcttcggcccactacttggccggagcgaaacagctagcacgcaggaggtcgcagaggctctggtcgacaaggtttgtaacttcctctttggccaccaataccggcccccaaatacaagagctgtcggctctagtctggatgcgattgggattccgcagggtccggttctatctgcatatattggtaccatcgccttgttcccggtggatgctgcggcgcgcaggttcatgcgtcgcaacgtccgaccggggcaggatggtatgaacctgccccgcgtgggctatgcccgttatgtggacgacatcgtgctgttcgcagacagcgaagcgctgctggccgagttacaagaggtcctccagaccgagtcagctaagttgtctatctcactgataaacaagggcgaacgcattagatccggcacgccagagcaggtgatgcaccagctcaatgagggacgcagtctggcagcttcggtgccggcttgggaaccaccattcgttggcgatggtgagtctggatggggtctcggcggcgatctgccagacgtagaccggcaatgcgctttgaaaatgctgcgacatcccgcactgatggacgagccgaaattgattcaggagcaggtcaggcaagccatgcaggctcctgacctccgtccaaacgatctgggcctgtgcgcccgatggttgtggtggcaggtggccactgaactgtccaacgaatctccgcaaaacgacccaagctcggcttggagtcgctactggcagttgtggcgacatgtttgcgaggggcacgactgggccggggagttcgaacgaaggggctacgcacagctatacgctgtggaaggcctggacaaattactcgattccaacccttggatggagaatgaacaaacccatagcgaagtaccgcagaaacgggcaattcgtattgggcttgcgaagctggtcatctcggcggggttcttctcggaggtgcaaccttctgagaataacgtgcatgtccagcggcgcgcgcgtcttgtggccggtaaggcgcggcagctttccggcgggctgtcgaccactctactaagtcagccacaagacacgcagccggttacgacgatcgagtggttgtgcatggctgctgaattggtacgtgcggcccctgtcgatattgctggcgctgaaggtacgcccccgattctagcgcccatcaagaatcgggttgctcttggcaccgtggatgctgtggcatcgcaggtctgcgaagtgctacggcttgcggatactcaggatgggaagcttggtgacgtattacccaacccagtgcaggatgacgtagcgcggctagcacttggtttggtgatagataacgcgacccccaatcagcggctggctgttctgaccaagttcccgggactgctgagtatccgcagtaacggtgacgagctttccttggttcagcgtttacctatcacggagataacgtcactgtgggccttgggtgagccgcaaaacggggctcgatatctctaccggttctccttgcccccttcgccccttgcgtctcgagacctggcctgcgttgaacttgcgagcgatggcatgccagaggccaggttggaggcattgagcttcgaatctacgtcgctcggcccccaatcgtgccctcaccaattggtaagagagaagagcattgaaagtgtttcatgggcgaagtttgacttggattcatcgcccaatttgagtcggactgaactggcggttcgcctgtacgtcgcgctagtggccatgcagcggaaggacacaagcgatgctgatctaatgtacgttccttttgcaccacagctattccgatcaggcgatgccacgcagccaacgctgcacttggttgcagaacctgtgaagcgccatacgctaggtgtgagcgcctggtaccgggattgcgatgggcgggtgcgtacggttagtgttccacacgtcggtgctgacctatggcgtgcgggctgggcggtggccgacgcattgggcatggcggtagacatgtcaggagaaaccggtctgcgcgatgagcaactgtcggacaagacgccgatctcggttgagcactatctactccgtcagcagttgcgcaagctgcagggtgtttacttgtctgaggcccagacattgcgcaaagatgaacagaccggcctgccgcgcacagtaatgcgggcgctgcagcttctgggcgaattcgatggtcgtgcggaacctgaccagcaagtgcgacagttactggttatggaggcggaaacacgggcgatggccttgcgtctacagcagcaggggggcgagagtttgcacgcgctgttgcatcaggtgtttccagccgtgctgaacaaactgcccttgtgggccatcgattgcttggccctgcctaaccagcccgccgaacaccaaccgctgcggccagatttggcactcatgctgtcgttgtgcacggccatggagggttattggggccaggggggggcagcgcatcaccatacaaccactccggctctgcgtgcggcgctagctttggcaacagcgggagcagggttgcgtgggagcgttgccgcgctatggggtctgacacaggcgcgtggtgccctgcggatgcccgagcgccttgacctgccagccgcttggccgttgcctgatatggtgcgcacggatccgcagtcggactacaaagccatgcgccaatggctcatcgaaggcgattggccagcgctgtgccgcaccagcccttggcactggatgctcgcgctgaccggtctgttgggtgccaacttcccacaggcttttgaactgcctcagttgcagcaggtctttaccgcgttggcagcttggcagagccaactaagcgctgaggacggcgcctccgtatggccttatgatgggctgccagtactggatccgcagcagtgggcgacatttctcgacgcattgcctctggcgatcaggcaaatcgacgatttgcttggcatgcgggtggccccctgtactgccccacggtatcgccgcaacccccataccggcgagttcaccgatgccagcaatcaagattggctgcttggcaagtcgcagttcacaggactaggtgctgttgaccgcattgcacggcgtaccaccggcggacgcattctaaacgtctggacagagacccggagaaaggctgacgatgagctactggcagtgcatacgctggatcgaaagctgggggcctggttggaacgcgccgatcaccccgagacagcgtacgacggcacgggcgctcctgtggccatgccctcggagaagcctgctggcgaaatcgtcgagcaggtattggctacctttgtgccggatgtcgctgagtctgcctcagacctagcccaaagctctactgacgaactgacggagaagcctactggcaaaatcggtgagcagatattggctccctctgtgccggatgtcgccgagcctgccccagaccttgcccaaagcgctgctgacgaaccgacggagaggcctgctggcgaaatcgtcgagcaggtaatggctccctctgtggcggatgtctccgagtctgccccagatcttgcccaaagctctactgaaaaaccgacgatgcagcctgtggctgagatggacggcggagccaatattgagtacagcaaggatgttgatcgcttggcggagcacctggacatttcacagaagcagtcccgaaagagtcgtgctgatcacaagaattcgaaggcccatttccgcgttgcattgttccaatggcaggtcgaggacacctatacacatcctctgagcgaagtcggtttgcgaggcctgcccattggtgaaggggctaaggccgaactgcgtggaatggtcgctgccaatggtgacctctcggtcgctgacaaggccgccaaacggggtgaggagcaccaatggaccaacaacgtgaaggtcatgtcctggcatgagcacagacgccggacattgatacgtcaggcattgaatgcttgcaaggatcttggcgtgcaattgcttgtgttgccggaggtctcggttcggagagacacggttgagtggctcgaaggcgtactgaaagactttgaagggttggcggtactggcgggtacctatcgccacttttccaccagagcggaagaccgcgaccaccttcgcgcaccgctgacgttgctctggcggcccgagaccgaaatggccaaggcgcttgggcttgggaatgagaacacgacattcaagttcgaacgcggcaagaagtatcgtgcggtggctgctaatgagttgttccggcccgatttgagtcagctctctccgctctacacagaagtgaagctgatggaggaggtcaagagggaactcaaccgtcgaggacgaagcatgcttgggccagatcaactgcctgagctggctcatgcactggtgcatttgtcgccacccctgcgctattgtatggaactgatttgctcggagctctttctgctgaccagtccggccaattttgaaccactgaggaaagaggtgaacatgctcttgcagcggttcccttcgtactctgaggatacgaagaaattgattcgggatgacatcgaggcggtcggtgagctgctgactgttgcccagagaaaccgggagcggcgttcggtgcttctggtccctgcatttacgagccgcagtaacgactattggcacgcagggcaggccagtgtgttggcttccggcacggccactgtgttctgtaacgctgcccacaagaacagtgctggtgggagctgcttcattggcattaattcagtgagtcgctcgtcggagaccgcagggattgttaactctttgacgccttatcacggctggcaaaagggcatcctgcaggcgaactctgaaggggcgctttcgaagcatgatcaggcgcttgtggtcgtagatattgatccagtacatgtggtgagtggtaaaccgaggccacagctgttaccagagcccatgtccttggtggcctatctgccagtgatcgaactgatggacaaggaccaaaccgctgatggtgtagtgcgtgcattggaggcggaacttgaggatccaggcatggggggtaaagccagggagctgcttgcggcaacgggcttccatgcgcatgacaagttttacagggcttaccagacgcttctcaatgaaaaagggtctgacatcagcaaagcgcacggcgcaaaggcgttggatgattttgtgaagttcttcgcagacccggatgcgttgcgcaagcgtttcttagcttggcaagatgaacgacatcagcagccgagtctcgtgtccggaagcctgcagttggagccggcatggctcgatttcttggttgcggatatgacatgcatcgatcagatggccaaagtgagggtgccgccatggaaggagaacttgggaataggtgggccttctctagcgagtgactcgtga

SEQ ID NO: 392 - DNA, 3894 bp, Escherichia coli
tctccacttcttcaaacatccgtatttatccataaccgcactgttttataaaagattttttgtttttactgttcgtattagtccataactttccagtagaatccagtactaaatgtgtataggattatgtatatgttcctgttcgattttggaattctatacacatgcccctaaatgatatgcagattcgccgtgctaaacctgaagctaaagcctatacacttggggatgggcaagggttgtctttacttgtagagccaaatggaagtaaaagctggcgatttcgttatcgctatgccggtaaacccaaaatgatctcgcttggtgtttacccaacgatcactcttgctgatgctcgttcccgtcgtgatgaagctcgaaaacttgtggcagaaggaaagaaccctagtgaggttcgaaaagagcaaaagctggctctgcaaacagagtcagagaacgccttcgaaaagatagccagagagtggcatcaacagaagtctaccaaatggtcggcgggatatgcatcagacatcatggaagcgtttaagaacgacatttttccttatgtgggaacaaggccagtgggagagattaaaccgctagaactgcttaatgtgctgcgtaaaatcgaaaagcgcggtgcattagaaaaaatgcgcaaagttcggcagcgatgctcagaagttttccgctatgccattgctactggaagggctgagtttaaccctgctgcggatctttcaagcgccctcaatgtacaccaatcaaatcatttcccgttcttaaaggctaatgagatacctgattttcttcgcgccttaaacggatataccggaagtcggcttgtcctgattgccacgaaattgctcatgattacaggtgttagaaccatcgaattacgtgcggcattatggtcagaatttgatttagataacgctatttgggaaattcctgctgaaaggatgaaaatgcgcagatcacaccttgtgcctttgtcgactcaagcgttagatttgctaaatgaactcaagatgatgacagggaagtatagttatgtttttccggggcggaacgatccgaacaagcctatgagtgaggcgagtattaaccaagttatcaagcgtattggttatggtggaaaacttactggtcatggatttcgacattccttatctactatcctccacgaaaaaggatatgattcggcttggatagaaatacagcttgctcatatagataagaataatattagaggtacgtataatcatgctcaatatattgataaacgccgtgatatgatgcagtggtattcagattatatttttattaaggagaatgtgaatgagtaacgagtttgatagtagtaaactagaaaattgctttgagcttgcattggaaaatattataaagcacggcgatacagatattttcccttacccatttgaaagtcggttatttgaagatgataaggagaaagtaaaaactgcattaatgcaaacatttaatgactttgaaaataaaaggatcgagattccaccaaacataattaatagcttttcaagtattggttattatggttacaggtgggcgacccaaattgatccattctggaatgctttttttcttgggttagttttaaaaatcgctgatgatattgaaaggaatagatctactaaaacgcaggtttattcatatcgctttaaaccaaaccttgctgatggttctctttttgataaagagatctcttggagaaaatatcaagaagacagtatctctgaatgttctaacgatgaaataaagtatgtacttacatgcgatatagcagatttctatccgcgtatttatcaccaccgtttagaaaatgcgttagatagagtcgaccccaataaagattactctgggaaaatcaagaaattactacagacatttagtgaaacaaaatcatatggagtaccagttggatgtcctgcctctagaatattagcagaactagctctagattctattgataaattattgtctatgaatagaatcaactataagcgttatgtcgacgactttgttattttttgtaactctagagaggatgctcataagattttaactttgcttagtaaaaaactgatggaaaatgaagggctaactttacagaaacaaaaaaccaatattgttactaaagaagagttcctttcagtaactaaagctaagttgcatggtaatgatgaagatgaagaatctcctatgaaggctaaatttatgagtcttcctataagattcgatccttactcagcaaatgcgatagaggaatatgaagagataaaggaatctttaaaagattttgacttgttagctatgctgagtagtgagttacaaaaatcaaaaattaaccaatcttttagcaagcatttgataaaggcattctcagcaacatcagatgaaataataagtagtgctttcaaagtaatgtttaataacttgcatgagttatatccaatatttacaactataattcaagtagctaactccaactggcaaaaattaagcacagaaaccaaagatattattcttgataaaataactgcactaattaaacaagattcatatattttgagtactgagctcaacttagcctatgtagcccgaatgctctcaaaagaaaattcagaaaaatccaccctaatccttagtgaaatatacaataacaatccagaaagcatcttagtcaagaacatagttacacagtcaatggcaaaaattaattcttacgcatggctttctgatatcaaaaaaaatttctctgcaatgcatccgttgcagagaagactattgatcgtttccagttacatcttaggtgatgaaggacggcactggagagagcataataagaaaacattcaactttgtagaggtgatttacagggattgggcaagtaaaaggcataccgcaagaaatcttgaggatgcgctatgatatctgaattaacgttttctcgaaaattcacttcattttggaatcaattgcttccaaatgctaataatttcatacgcatcattaacggcagtctcatcgaggacgtttatcctcctctagatgactgcgctaataggtcaaataacgtctttgttaatgagtgcgcatttaatttatatagggcaatacagaatgattcgttagacagaaatattctttcagcacatgatatcttccataatgctgattttcaggttgtttttgaaaaaacaaaagaatatctacagcggttcgcttacggttctaacttcaagctacccttaagcatggttgagtacaatgccataagggaaatagcaagaaacattttgtctcgatatggaatggaaaaccaaattgaagtgtctccacaattcgatggatgcggagtaataaataattcatatggcgatatttattattcaaatgttcttgtggaaataaaatcaggagataggaagtttagtgtttacgatcttagacaggtgctaatatatttcactttaaacttttactcaaaaaacaaaagaaacatcaagagatttgagcttttcaatcctcggatgggtatcacttatagtgataccattgtcaaccttagcaaagagttggcgtttattcaacctgaagaattgtactttgagataatgaattctattacagaagaaaatttcatagtaactgaaatgcaacgctagatatcatgcagaccgctacaatccattgtagtggtctatttctaaacgttccttctgacgaataaagccaaaataccaaatagaattaaagaaaattataatatcagccttagcgcgcaatgctccccccgccacgcccgcccgctttgcggggcggttttaatgcagttgcactgacacgctcaga

SEQ ID NO: 393 - DNA, 3208 bp, Photorhabdus sp.
atgtcatataatgaaaatgactgggataaagaacatctactatcgtttccaataaatgtgaaagcggtgattgcacatatgcgtcaggacatgagagacgattggtttcctgatcctctatcctataatgacctatttgaaaaagcggatgatctcagagaagtactaatggagttgctgcttgaaggtaatgggcgctatgaagggaatctacgaaatttatgtaacatacccaaaaaagggcttggcataagatattctctagaaactgatttttacgatagatttatttatcaggcaatttgttcatttttaattcctttttttgatccattactttcgcctcgagttttagggcatcgatataacaaaaaaagaactaaggaaaagtacctttttaagtctaggattgaattatggcaaacttttgaaggtgtaacctatactgcaatcactagtagtaaagctttgatggctacagatgttcttaattattttgaaaatatatctatcgataaagtcaaagaaagctttgagttactaatcccccaggtgaaagcaaatggcgcggaaaaattaaagatcagaaatgcaatcaatacactctgtgaattactttgcaagtgggggttcagtaaatttcacggattaccacaaaatagagatccttcttcattcatagctaatgtcatgcttaattctatcgatcagaaaatggttgttttaggttatgattattatcgttatgtggatgatattagaataatttgcccagatataagtagtgctaggcgttcactaattgagttaattggtgcattaagaactattggaatgaacatcaattcaagtaaaacaaaaatacttacatctgattcagataaggatttggtagcagaattttttccgtcacttgatgatagaagtataactatagataatatgtggaagtcacggaatcgaagaattattgccagatctgccaagtatattcatgcaatgattaaggattgtatagagagacaagaaacacaatctagacaatttcgatttgcagttaaccgcttgataaaacttgttgatgcaaatgtttttgacgtacattcttcattaggtgaagaattgcttgatatgattataagtacctttatcgatcacccagcctctacagatcaatactgtagattaatttgtgctttgcagccgttagataaacattttgaaaaaataacagatttcctatgtgatcatgattctgcgatacattcgtggcaaaactatcatatctggttgactttagcctaccataattttaaatcagaccagttaattgagacggcatgtgagcggttgaatttaatttcaaatgatccagaggttgcggctgtatttatatacttgtcttgtattggtgagacggaaaaactcattccggtaatctctcaatttgatgccagttggcctaacaggcatcaacgaagttttcttcttgcaactaaagatttgcctcaagactcattaaaaaaaatagttgaaaaattgacaattaagcttaggaatacggctagaagggctacgccacactattataataatcgcccgttagcagaacggaagtttcctaagattgttgatctatatgacgaggttaccacctatgattgatgctcaacctaaagtatttttatttattaaagattattctgagttaggtgaagataggtattttctattaaatgggaatgtcttctctgaggtttgtgcagagcaaatagtatcacaaacagagctgattgtttgccacgattattggttaatcgctccgtcaatttggatgtctattgggtcactcccatctttgattgtagatgtagatgaattccaaattattgtatctggaatgaagaaagaaagattgttaagagactgcaaggatatcacgagaaggtcgaatatatatgaaggtaatgaggacttatgttctaggtattttaaaatatttaaccgaactttaccttttgaagaggcggtttttagggactttagccttttactaagggaacattatctttcagttaaaaattatgcatctttaaatgatgagttatatcggtttgaaagtatagagattcctgtttcgagatatgttataaattcaatttgcaggggaattaaaataaatcagggccaacttttaatacataaaaaaaaccttgagcatgatttctacactgcattgaaagaatactcagcaaaatataatgtacctcttgaagtacctgatgatcaagatgttatagagtatttagagcctatgggatatgattttacgggtgtagacgtggactatatccttaaatttgtccctatggaaagtaattacgcgaaagatgtattgtcgcttaggaaactatctcgatctagaaacgttcttaattctatacctttaagcacgcgccgtgcttatccgatggttgatacttttgggtctattacttctaggatttatttaagagacccatccttgcagaatcttgcaaaaaagcatcgtaacatactaattccggacgatagaaagcgatttgtatatgttgactatgatcaatttgaggctggaataatggcagctctttcacaagatgaggagctgttatcattatactcggggaaagatatgtatgtgggtttcgctgagaaacttttcaataatataaatatgaggaaggacgcgaagaggttatttctgtcatatgcttatgggatgtcgatgaaatcattgatagatgcagcggtaggatttggtgcgaatagaaaggtggctaaggaaatattcaaaagctttgtctattttgaaaaatggaaagaagggatatggagtgattttgccagaagtggcaagattgggactgctaatggtaattaccttatacgtgatagagaggggccattagatggaaaagagaaacgttcatctgtaagtcaagtgattcaaggaacagcttcattaatatttaaggaagccttgatgtcgctggaagctttgaaagctgtagaattattattgcctatgcatgatgctgttttggtacaggtgccgttagatttcgaggataaagttatagcagaattgcttgcaaatgttatgtctgaccattttggacaaaagattgtaggtaaagcttctatcgacactttctttgaagattaa

SEQ ID NO: 394 - DNA, 3211 bp, Pantoea sp.
atgtcattatctaatttagagaataaaaaagacgatggtctatttcatttcccaattgatgttgatgctgtgcttcttcatttgaaacaggatatgcgagatgattggtttcctgactgtcttcagtatgaagaccttttttataagaaaaacaacattaccgaaaaagtagagggcaagattgtttctggacatggtgtctacgatactgacattcggtttatccacgatatccccaagagtactttggggttaagatattccctcgaaacagacttttacgatagatttatctatcaagcgatttgtagttttttaatgccttattttgacccattaatatcgaatcgagtttttagtcatagatacaatgaacatcgaaccaaagaaaagtatatttttaaaaatagaattgacttatggcaaaatttcgaaggcatcaccaagctagggatatgtgatgataactatcttttggtcaccgacttacttaactattttgagcatatttcaattggaaatatccaaaaatcctttatagatttacttcctaaagttaaagcgacaggaaaagtcaaaagccaaattagaagcgccatccacactttatgtactttacttgagaagtggtgttttaataatcttcatggattacctcaaaatagggatgcatcatcatttattgcaaatatagtattaaccgccgtcgataaagctatggttcaaaaaggctatgattattttcgctacgttgatgatataagaattatatgcaaaaatgaatttcacgcaaaaaaagccttgaatattctcatatttgaacttcgaaagcttgggatgaatattaactctaaaaagacaaatatatactcttcgtcatcatcccaaagtgataaagaagaactattccctggtttcgatgaaagaagcattgccattgacaacatgtggaaatcaaggagtaaaaacgtaataatcagatctattccagaattaactaatatgttaatcgaactaattgataaaaatgaaactcaaagtcgcaggtttagattctgtattaatagaattataaaactagtctcaactggattatttaaaagtggttcaattctatcaaataaagtagttggcgcattgattaaggcattatatgaacaaccggcctcttctgatcaaatatgcaagcttttggttgatttaaaattcacaaaaaaacataaaatcgctttagaggaatttataaccaatgatgagctatgtatttacggatggcaaaaccatcatatttggatattattgtctctaaagaatatttccacaaaaaaaataattgaccgtgccaagtgcatttgcaatatacaacccataccatctgaagcatccgcatgcttcatatttttagccatgaatagtgaatttaaatacctagataccttagctgacaaattagacaggacatggtcatttcagctgcaacgccattttctccttgcaattagaagctcaaaaaaaacttcatcaccagagcttataaaacatgtactgccagcgatacaaggaaccgtaaggggggttaaaatgaacaaaaaattaaaaaatatttttattcatgcaaacccaaaccctgtctctttttctgaaatctacaatgagttaagtccttatgattgatcaatacaacattcttttatatctaaaagactttcaagctaaagggaaggatcgctattttctatttaaagaaaacttgctatcggaagtacaagcagatgaattgtttaatttagactcacatttaatcactcatgattatacaatcatttctgagagtatatttaaaaaatgccataaactccctaataaagttgttgacattgtcgattttaagaaatttctattacaagaaaaaatcaccgaaaaaaacaaagattcctttaagataaaagaaatcattaaagacgaattccaagacaaaaatgacttaatagaatactttgagatattttataagaagaagcctttcaatattgatacctatctcttatttgctcataaaatatcagatggatatgagcgtttactcgctgaatcgttggcattaggagagcaggatagatatttcaacattgaaattccatgctataacgcattgtgcactcatctggctgctggcataaaaatcaacaacgaaaaattaaaagaatataagaacgagataaattatgattattttaaaaaaataaagtcatttagtgaaaccttcaacttcatgtatgaaatgccttctaatgaaagcatcaagcgatatgtcacagagaagggatatagtcttagcgaagagtctttagattatataattgagtttattccaatgcctgatgattttggcaaaaaagttcgtgagttacaaaaaataaatgcaactagaaatacattcttgagcatgcctcactcaaggaacacaatttacccatcagttgatgtaaatggctccgtaacttcaaggatatatttaaagtcacccaccattcaaaatatatcaaaaaattacagagacatattcattgctgataaaggatgcgcgttgagttatgttgattatgaccagtttgaagttggcattatggctcactttagcgatgacgagaaattaatcgaaatttattctgatgctgacatatacttaaaattctctgaggatgtatttggaaccgctgagaaaaggaaaattgccaagcggttatttttgtcttttacctatggaatgagtaaagaaaacctcattaaggtcgtcgaagaaaatcaaggcaacattagaaaagcaagagaattcttttcttcatttaaaaagtttgatgaatggagggcgcgtactgtacaacagttttcagacgaaggtagagtcgggacacttcatgggaatttcttgaagataaaaaacgcaggagatctctcaaatagagaaaaaagatcgtgcattagtcaagttatacagggcacaggttcattaatttttaaaaaaaccatcatcgaaatatctaaaattaaagatttaaaaataatcatccccatgcatgatgcacttttgattcagcatcctgatgactttaatgctgatataattattaaaatatttgaagatgtcatgagcgatacattaaaaaatgaaaggcttatcactaaggcttcattgggaacttttatttaa

SEQ ID NO: 395 - DNA, 3196 bp, Vibrio litoralis
atgaatacattcaaagcagaacaacttctaacatttcctattgatacaaatgcaacattaaagcatctacgacaggacatgaaagatgactggttttatgatgcaattaggtatgaagatctactctctaataagactgacttgcaacgtgttttagctgaaaatcttaatatcaaccatggtaattataaatcaggtgacaaagctatttatgatgtgccaaaacgtgcattgggtctacgctatactttagaaacagatttttatgaccgctttctatatcaggctatatgtacttttttaatgccttatttcgatcctcttttatctaatcgagtttttagccatcgatataataaatatggtaattcaaagtatctttttaagcatcgtattgaattgtggaatacatttgaaaatattagctatgtttcactaattgatgataaaacacttttaataacagaccttctcaattattttgaacaaataaatattgaatcaattgaaagttcattcattagaatgatagcagaccttaatgtatcaggggcagaaaaaaacacgattagaagtgctattagcactttgaaagttttattagagaaatggtgttataacgataagcatggattgcctcaaaatcgtgatgcttcatcatttattgcgaatgtcgttcttgattctgttgacaaaaaaatggtaaagaaaggatatgattattttcgttacgttgatgatattaggattatatgtaatgatgaaatggaagcaaggagagctttgaatgacctgatttttgaattaagaaagttagggttgaatataaattccaaaaagacagaaatactcaataaacatagtggaaataaagaggatttttttcctagtaaagatgacactatgactttaattgatactatgtggagatctaaaagtaagaaagttatcgcaagatcgattccaattctttttgagtttttaaaaaatcagatcgacgagggaaaaactcaaagtagacctttccgttattgtataaatagatttaagaccttgatatcatctaatttatttgaggctaaatcagttttagctagagagattgcagatacattaattggggagctagggaaacagccggtttccacagatcaattttgtaaactcttaatggatttggacttgtcaaatgagcaaaataaagtcatatctaattatatagtaaatgaaaatgtagcgatatatggttggcaaaattataatttaatactacttatggctcataataaatattttgatgataatttgattgatttttgcaagctgaaaattgaaaagaaaattaaaagcccagaaacaccagcatgttttatttatttggcatcaattggcttgcagaatgaggttgaaaagtttattgattcttttgataacacttggccatatcaacatcaacgatactttttaatagcacttcaagacacatcaccaaaaaaattacaaccaatgtttggtaaggtaggatatcgtctaaaagggaccgttaaaagattaaaggaaaataaactatttaaaggcgagtcaatataccttaaggattttaactcgactttaattcaagaaatatatcatgagatatcaccatatgagtaaaggaaaagtggtttttcttgtttatcaaaaagacttttcagaaagtggaaaagaccgatattttatatttgataatgaaagtctttttgaggtaacagtacaagaactcgttagttataaatgtttcattgttacacatgacttttggttgatttcaagctctatatataaaagtgcaaatgtattaccgaataagattattgatgttgtacttttagcaaagattgtatctggagttaaatctgttactagtgatactcaaccatgggatatatcaaaaactatcaaaccaatattctcaaaatctgaggactttaattattatatggatgtgtattataggaggaaaagttttgattttgacatatatcttctttttgcacataagctctgtgaatattttgaaagtttaagtgaaacttcctatcaacaagaggaaacgagtaggttttatagtttagaattaccagtatataatttaatgactttagctgtttgtagagggataaaaatagataatgaaacttttcgagagcacaaggaaaacttacaattagatttttatcgagaattaaaaaagttttctgagaagcatgatgtattgtatgagttaccaaaagaaggtgatattcgggaaaagttaattacattgaattatcatgttgatggcgtgtctatagattttctacttgatttcataccctccatagatggatatacggatgatcttcgccgtttgcagaagataaataaaagctatcaaatatttaattcaatatcgagctcctctaatagattgcatcctatagttgaatctcattggacatcaacatctcgaatttattataaatctcctgcaattcaaaatattgctaaaaagtatagggatatttttataccagatgcaggtaagatattgagttacgtcgattatgatcaatttgagatcggagttatggcttatatttcaaaagatcctatgatgattgaaatatatacgagaacagatgcttatagtgattttgctattaaagtttttaacgataaaaataaacgaaaaagtgccaaggtaatatttctttcatatgtttatggtatgtcaatggataatataaagaaatctacaataagcatgggagggaactctggcaagcttcaagattactttgaaaaatttgaggtttttgaaagttggaaacaaagtgtttggaaagaatttgagagtgaaggtcgaattggtactatcaagtctaactatttaaaaagggcaggtgaaggtaagttaacagaaaaagaaaaaagaatttctgtaaatcacgttattcaaggtacagcaacttatatttttaagcttgctctgttagaagtttcaaaagttgatgatatagatatattgatcccaatgcatgatgcggcacttattcagcatactgaaaaagtaagttctgaaaaatttaaagaaatatttgaaaatgttatgacagaagtattaccaggtattcaaggaaaagcttcattagaagatttctatatttcagaataa

SEQ ID NO: 396 - DNA, 3382 bp, Pseudomonas brassicacearum
atgagtgaacaattcgtgtccgaggcggcaggaactccgcatctggcagagcaggatgatggtcttaaaaatctgaagttattgattgaatccttcaatacagacaaactgaactccagcgaacaaaagaaactccaagaactccggtccattctttcaccactactaaaaaaaggtggcgttttagcagacttatttcaagacgggaaagacgttttagcatttccgatcgacgtcgacagtgtcctgcaacatttaaaccaagatatgagggatgactggtttactgacacacttcaacacaaagatcttctctcgaacaaacaatcccttcatgaagtcctacatgaattgttaaatgaaggaaatggacaatatatcggctctttcaggagtgtttacaatataccaaaaaaagggctagggattagatactcgctagaaactgacttttacgacagatttatatatcaagcaatctgtaccttcctaatacaattttatgatccactcttatctcatcgagtactaagccacagattcaataaagatagaaaatcagagaaatacatatttaaaagccggattgatttatggcaaactttcgaaggggtaactagaacggcactcagcaataatcaatcactactagcaaccgatctaatcaattgctatgaaaatattacaattgaaacaatccgcacagcgtttgagcgatcaattgaacatataaatacttccggtccaaataaagtattaattaggaatgcagtgcaaaccctctgcaaccttttgtcgcgatggggatacagtgaacgtcacggcctgcctcaaaaccgcgacgcatcgtcattcatcgcaaacgttgtcttgaatgatattgaccatgaaatggtgcgattagggtacgattattatcgatacgtggacgacatcagggtaatttgtcccaacacgagagtcgcaaagaaagcgttgaccgagcttataaatcagctcagaaaggtcgggatgaatataaattctggaaaaacaaaaattttaacccaagactcgactgctaatgaagttgatgagtttttcccaacatctgacgatcgaagcctcacaatcgacaacatgtggagatcaagaagcagaagggttattgcgcgttcagcaaaatatatatttcaaatattgaaagagtgcatcgaagaaaaacaaacacagtccaggcagtttcgattcgcggtaaaccgactaatcaagctgaccgatgcaggcatttttgatattcatgcaaccatagcaacagacttaaaagcactcttaattagctcacttgaggaccatgcggcttcgaccgatcagtactgcagacttcttgggattctagacctcaacgagcacgagctcaatgatatttacaaccatctcagtgatcatgagcgctcggttcactcttggcaaaattttcatctatggttacttctagcaaatcgcaaatataaaagcactaatttaataacgctagcaactgcaagaatagagtccgacatacttcaaccagagatagcggccatctttatttatctaaagtgtgttggtgaagcacaagttttaattgataacatttccaaatttgagtctgcctggccatattaccatcagcgaaattttctattagcctgtagcgattttgatcataatcaactgaaacctttaatttctaagctaggccctaaacttaaatggaccggtagcagagccaagccttattttactaatggtatgcctttggtcgaacgagacaaaatagccatgcttgatctttatgatgagatcacaccatatgactgaatccaaaaaagccttactttttatagctgactatacagaccaagggcaagacagaatcttcttatggtcagatggcactttaggtgaagtcaccatatctgatttagtagatcaaaagcatgagcttgtctgccatgacttatggttaatcgccccatcgctctatcgggcgacaaacaaactaccatccaacatcacagatattgaagaacttcgaatcctcacttctggaaagaaaaaagaaagagaatcgagagacaagaaagacatatcccaactcctgtcctcgtttgtttccgaagaaactattgcaagatataaagagatttttaaccgtaagatacctttagatgaagctgttctgtcttcaattggcgaagccctattaaaatgctcagaagttgtaaaaagcgatgcaaatactgccggtgaatgggagagattcatcacaatcgaacgccccgtaaacgactatctaataagatcaacatcagaaggtatttctatttctgaagaaaaacttagataccataaaaacaaaatagaattcgaattctatatggcattgaagagtttttcttccgactacgatatgcctctagaggttccctccgatcaagccgttatcgaatacctagagcctaaaggctttgactttaccggcctagacgtggattacattttaaatttcgtccctatgcaatcacattttgcagaggacttaattcgcttaagaaagattcaaaattcacgtagagtattagcagccattcccttgagccaaagtagaatttatccgatagtcgatagctttggatctatcacctcaagaatctacttcaaagacccgtcgttacaaaatttggcaaaacaccatcgagacattttaattccagataccaacaagcagttgtcctacatagactacgaccaatttgaagcaggcgtaatggccgcactctccggcgatgagaaactattagagttatataacagtagcgatgtatatgaaattgctgcaaaagaaatatttgacgacaagagcaagagaaagcaagccaagaggctatttctttcttatgcctatggcatgaagcgacaacacatccttgctgcagcgcagggctttggtgcagatcgccaaaacgctaagaaattctttgagcaattcaagacattcgaagcttggaaagtcttagttcacgaagagtttcaccgtacgggaagaattggcactgcgcttggcaattatatgcaccgtgagcgaaaaggagaactaacaagcaaggaaaaaagatctgctatcagccaaattgtgcaagggactgcctcgttaatattcaagaaagcattactatgcttgagttcaatatctgaagtaaaactaaaactgccaatgcacgacgctgttttgctggaacatcccgcagactacgacatggatcgggtaatcaatattttttcagaaataatgtctgaacattttcaaaataagattcaaggcaaggcgtcattaagccaattccatgaagatctataa

SEQ ID NO: 397 - DNA, 6514 bp, Escherichia coli; identical to SEQ ID NO: 43

SEQ ID NO: 398 - DNA, 6261 bp, Salmonella enterica; identical to SEQ ID NO: 45

SEQ ID NO: 399 - DNA, 10166 bp, Pectobacterium wasabiae
atggctaaagcgcactccacgccgctcaacgatattgcgattatcgctgcgaatttaaaagaccgttataaaaatggcttccctgttctgaaagaaattgtgcaaaacgcagatgacgcacaagcgtcatcattaatctttggctggagccctggtattgctggggcagatcaccctttattgggcgatcccgcgcttttctttatcaataatgcgccgctgacactcgaagatgtagaggggatcctctccattggcattggcactaaaccgggtgatgaaaatgcggtggggaaatttgggctcggtatgaaaagcctgttccatctcggtgaagtatttttttaccagtcctttgactggcatactgcttcggccaaatcagacgtttttaacccctgggacagttacagatcttcttgggccgaggtgagcgagcaggataaagttcgtattgaggatgaagtccgcgcaattacccaaaatgcgtgtgatgattatttcgttgtctgggttccgctgcgttcagagagtatctatcaggcgcgccaggatgatgaaaactttattattgtcggcgaagactatcgttatgaggtgcctgattttatttcagacccgggactcggggataagctcgccagcctgttaccgctgatgaaaaccttgcaggacattgagctggtcgtgaaaacagggcaggggtatcagcgtcaaatacatatctcgctgcctgaaaaggcaactcgcccacaatttaccaatcttaatggtgctggggaatggcaaggccacattaccgttcagcgtgctggattgccggaccctcagcaaaaattctacgtcgggcatgaggttttgctgaatgctcctgagttttctgccctgaaatcacaacgcgcctggccattcagttattcacgagaaggtaagaagactgcggataaagcgctgcctcatgccgctgtggtgatgctggcggagaaagtaccagaaggagaggcaacgctggcggtggaatgggcggtgtttttacctttgggtgagcaggacaccgcgcagcatgcgcagaaacaaacattctctatttctggtcagtactcgtatcaaattattctgcacggttactttttcatcgatgccgggcgagtgggtatccaggggctggctacactcaccagcgccacgccgttattcaatgccccagattctccaggccaggaacaactggttcaggaatggaaccgctgtcttgctactcagggaacgttgccgctattaccgaaagcgcttgcctctcttatgtcgcttattcacgccagggatgcggaaaaagcggcaatttcggatggtgtgcgtagagctttacgcaacaataatgcctggttccactgggtaacgttgtaccatctgtgggtatgcgaactaacgcgggatggaagtcagtggtgtttagttgatgcgaacactcccgttcgtcgattgcctgccacaccttcaggtgaagcgcatcgcccctgggaagtgctgcccgctctggaaagtctgggtgtaacgcaccgatttatcgatgaaacgcagcagaatatctacaacgaatttaaaagtaagtggcagttgtcggagattcaggtgttgctgcatagcgtacccgaaatggtgttcactagcttaaagcttacaaattatctcaatcaattgctgaaagaactgccgattcagtcagacagctttgtgcttgacctgattgcattgctcagaaaaacgttatttagcgtgccgctggttgagctctcacgtaaccaggcggcgatcggagaattgatggcgttcattcgtccgacctggcgttacaggattgccattgaccgtcaggagcaggccctgtgggaaacgcttgggcgtaccgctatggataggttgttggttcctgcttttctcgataacagtaaagaacctgccagcgcatctctgaattgggagacggttggcagcctgctgcaagcgatgcagaaacaggcttctgccagcgataactttgaaaaattggtgcgggattttattggcaagctctcatctcccgatcgtcaggagctataccgtcggtttgataccttgaaggtctttaaggtttcacagccaacggggatatcttacctggagacgcgctgtcacttgcttgaactaaaacaaaagcgaaggatattcaaacttggcgggagcgctaattttggtatgggtttaagcgcattgttgcagcaggcattgcttgaaaaagaaatcgtattgatcaccaatgatattaaccagaccttatttggtggttctgaatattcagaagcaaaggagtgtgacagcgaaggggttatccatctgcttgagcttcaccctcgtctggattcgccgacaaaacgtatcgatttactcaataaaatggctgcggacggggacaaatttagcgccggagatcggcttgtctatcgctatctgatgcacggtaattcggatgatactggtgaagctgaattgtggaaggcgggtaaagcgcatcccgtatgggcaaaaattctttctgatgccgattcggagcaggtcaagtggactattatttcgccagaaattgagcagaatcttggactgactcccggattcgagaaggcgcttaggcttgatagtgtaacgccggatcatgtgatccaccgcttcaaagaaagccttgaatatctggagtttgatgacttatctgcagaagatgcggaagaagttctgatgcacattggccgctctatgggcgaaacaatgtggcggcagatggctcttcatcgtagggaaggcaaagaggggtatatatcccttgatgatcgttgtttcttgcgtggggggcgcattgaactgcccactgaattgaatgacaacgtgacgttcatccaacccgccagtcagccagagatgcaggatcagcagcgcaaatatctgacaatggtgaacgccgaacatgcggtcatgctggctttatccgggccgaacccggaacgttactgcgactttatcctgcaattgttaatgcaaccgacgaatgatttgtcttcagagagagcattcaataacctgcgccgccaaaaatggctattgcaccgcggtgtggcgatggcaccagaaaatattctggatattagcgcggcagactatccggagatcgcgaagctgacagaagcgacgccgctcatcgctctgcttgaggatattgctctcccagatgaggctaactgtgcgctgagttcattggtcgtgcgaggcaaggctgcgttttacaaggcgctcactgtagcaggtacacttccactttatgcaatcggtagcagcttacgtctcactgatacgattattcttcaggccagtgacaggtcgtacgcgtttgagagctttgacggttggttgctcttaattgagtgtctcaaaggtgctgagtcgcttgagggtaatgaggctatcaatgcgctgagtttttcgcatccggttacagacaagatagttgctagctaccggcatctcgttgacagcatgaatccaacccaaagtggtgaattgcgtaaagcactgttaagcacgctgtgtcatacccattcagatcccgccagcgtactgcgttcaatcccgctcagaacggctgctgatacctgggcgttagccaccaatctctgttatggcgtaacgggagcagaacgtagtgctgtcctacatgacgacgactgggcgtatttgtccccttggctgcaggctaatgacttgtcggtagacagtactgagtccgaagggcatctcagtcatgttgagcattctgccaatgtcttaagggaatactttgcgccctgggaacgctgggttccacgtaaggcaattgctgcactgctggctttgctggcggggaatcgtaaggttcataagctatgtgagagctacctggggttgcaaagttatgccctgttcgtgaatgaactgtcgcaagacagcaaacccttaactaaccatgacgctcactttgcagagttaacgctcttacagtgcattgagaaatatgcctttgccgtgaaggtttacgaagaaaacacgttgcaggttcattctctgttccaggaacgtttgaccgtggcgctggcaactgacctggatacgatctttgtgggtcagcacggctacgctttttataccggtcaggcaccgcaaatcttcattcgccgattttccccagaccagtatacgcctcagcaacttttggcgattctgaaacgcagcaccagctggctgcaggaaggtatttatctgcagaaggcaaggctagacacgctctggcaatcctttgagcaggccgagcagttggatgtgaatatcgcgcgcgtcactatcctgaacagcattgttgagcgcctgaaaacactgggccttaaaaactctcagcttaacgttttaatgagagcctatgagagtgagcttcactctcttgctgaaagtagtgacggcaagttgctccacagctcgaggctcactgaaattgtctatgacattgcaaatgctatccaggatcgccctgaactgcaggctgaaatattaacggcggtcagaaagcgtatagaggatgctcagtatcagccatcaagcgttccttttgagctgttccagaatgccgatgatgcagtagaagagttgttcaagctggatagcgatgcccgtcatgagcgggtacaccagaaatttatggtgaaagagcaaaacggcggattgtcattcttcaactgggggagagaaattaaccgctttcagagcgtgaaaaatgagcaagtcgagaatgtacatgatggctacaaaaacgatctgaaaaaaatgctggcgctttaccagtcggataaagagcagggcgttaccggcaagttcggtctcggcttcaaaagctgtctgctggtgtctgatcatccttacctattgtcggggcggctggcgactaaaatagcgggtggaattgtgcccgaatcctgtgatgctgaaagttataaacaactaaaccaactcactgaaagtgccgcgacaaatggcctgtcacctactcttgtgtatttgccactgcgccagcatatgcaagcggaagtggtgttaaaagattttactctgtatgcaggtttgctaagtctttatgcacgtaacttgtgccagattgtcattgatgagcatgaatggcgctgggagcctgttcagtatgcacgtattcctggtctgtcattgggcaaggttatgctgcctaacggcaagggtgctcagtcgccagtgcgggtggtggtttaccagactgaaatcgatgatgagcgctgccatctggttttccaggtcacgcgtaggggcctgagaagttttgatactcatattccgcgattgtggaacttgtcgccattgatgagtgatacccggcagggctttttgattaacgctggatttgaggttgatattggtcgacgccagttggctattgaagctgaccgtaatcggggcattatccagaaagcgggagcaaaagttcattcgctgctggaattactttggtgggaaacggagcataactgggaggagctggttgttgagtgggaactgagccctgaattgacccatactcagttctgggaaagcttctgggacgtgatgtctacaggcattagtaacgatattaacgcgatggaaaacgaaaaattgctacagcagctttacgaaagcgaaaatggcatcatgagcttctatcgctcatatcccgcgctgcctaacggatttaaagagcaggctgccggactgataacgtggagcgacagagtgcgtagcgcggatgaactggtttctcgtctggcgagttcactgattcatctccctgcgtttcaggcattgcacagtgcacagtgcctggtggcagacacgacgggaagcaaacttaaagtcgaaagtaaactgtcgcttgaatcattaataagctcgtcgttgccggataaacagggtgttgatatccagcatctgtcaccgcgggatgctgaaaagctggcagtcgtatttaacgaagagttcgacaagcgactgggtgaactgacaggctggcaggacaaaattgaggctttcagaaaacagctgataaacctgcatgtgcaaacacaagcaggctctacacgcccgattagccaaattttgctcggtaacactccttgtgccgaaaaaaatgaacggatgatctctgggtttgcacctaccgatgccatcatttcatcatcatattctaagcaggcctgtgaatttattgtttattgcaaacgcagaagtcagggatatgtttttgaggatttagtcaaatgggcaaagcgcaaaggcctggcggctgataatcaaaagcggcaggcattttgtcgttttctgattgaaggactggaaggggagaaactggcgggtatgctgatggaagagataccaccggactggttgcttgaacttaagctgcgcccaggcgccttcccggcagactggcactggagcaataatgatattgcctctctcctgcaggggcggttactgactaacattgacagaacaaaggcatgggagcgcgagattcgggagacaccggaagaatacgaaccgttggtgacaccaggtgaagccgtacaaaaaatacacacctggtgggagaggaaccagcaggaagagttggtgaaatacaatgctcggctctaccctgaaggctggtttgactgggaagctttaagaaatgcctctgacgatcagcgttcacgcctggcgttattgaaactcctgtatctaggctcatgccagaccattgggcggactcaggaagagcaacacagtgccgcaattgagtattttgaggacaaaggctggtgggaaacctttatcaaccctgatgcagcgcagcaatggctggatgtgatggacaattatctggaggattctttgtacggagatacctaccgtatctggctgcaaatattgcctctgtatcgtttttcaaagcatttagattcctatcgcaaactactggatatgtcggaagcgttccttgaggatattggggatttgctgcgaccggcatccagtttcaatctttcgggaacgggcgtgggaactgtagtcccggagttacgtgcaactctgggtactggggtgaacttcatcttccgtgaattggtgcgtaataacgtatttatcgattccagcattcatcgatattgtttctctgcgccggaacgcgtcaggcgtctgttactggcgatggagttcgacgaaatggatgttaagcaatccactgccagtgactcgcttctgctgtggacgtttttccgcgaacatctcggtgaggaagatgcgacctttaatcattgtttcgacataccgctgcgcattttaaccagcgaagggaaacgctcacttcgtattgagatatttggacaggatcccctggattacgtatgaaaatgatctttcagcagggccagcaggtacgacatgaacgctttgggctggggacgattgaactcttgcgggaaaacactgcactcattcgtttcgagtcgagttttgaagaacgtccactttccgaactggagccggtgcgcagtgctcaggatgctttggcagaaggaaattatgacgatctgcgtgaagttctggcgcgcagtcaggcgcttgcgatccgctccatcaatgatagttggggggtgttctctacttcacgtatcaacctgctgccgcatcagttatgggtatgtcaccgcgtgttacggcaatggccggtacaaaagctgattgctgatgacgtagggttggggaaaaccgttgaggcggggctaatcctttggccgctgctggctaaaaagcgtgtgcagcgtctgttggttttagcgcctgcatcgttagtaccgcagtggcaggagcgtttgcggcagatgtttgatattcgtttgtccctctactccgcggaaattgatactgagcgatcagattactggaatacgcatccctgggtggtcgcttcattgccgacactgcgaaaagatattaatggcaggcacgagcgaatgctcaaagcagacgactgggacttgctgatcatcgatgaagcacatcaccttaactcgctagaagattcgggggcgactcagggctatcgatttgtgcagaagcttatcgatcacggaaagttcgcctcacggctttttttcacagctaccccccatcgcgggaaaaattacggcttctttgctctgttgaggcttttacgtccagacttatttgacgtgaataagccatttgaaactcagcagcatcatgttcgggatgttgtgattcgcaataataagcaaaccgtcacgaatatggacggtgagcgtttgttcaagaccgtcaacgtgacctcacagacctatcatttttctgaggctgaacagtcattctatgaccggctcacacgatttattctttcagggcaggcctacgcttcgtcgctaagctctgcaaaccagcaggccgtgcaactggtgttaacggcaatacagaaactggcggcaagttcggtagcggcaatttatgccgcaataaatgggcgtatcgccaggctcggggaaaatcagaaaaagctgcaggcgctgaatgatgaaatgaatgccatcatgagtgattctcaggccccggatctcgatgatgcctacattgcgcttgaaagcgaatatgttgaaatgtctgcttcggttcaacttatgcaaaatgagctgcccatgcttgaagagctgcaggcgcttgcggggaatgtggaatcggaaacgaaaatccagaccttgcttcatgtgctggaaaacacgtttcttaatcgcaccgtcgtattctttactgaatataaagcgacacaggccctgctaattaatactctgaatgctcgctttggctatggttgcgtcagctttatcaatggcgaaggacgcctggaagggatttacaataaacagggcgtcaaaacgtcatggagtatggatcgctaccatgctgcggagcaatttaaaagcgggcaggtacgctttattgtttgtactgaagccggtggtgaaggtattgatttgcaggacaactgttattccatgattcatgttgatctgccgtggaatccgatgcgtcttcaccagcgtgtagggcgactcaaccgctatggtcaaaaaaatcaggttgaagttattactttacgcaaccccgatactgtagagtccagaatatgggacttgttaaacagcaaaataaccacagtcatgcgttctttgggcgacgcgatggaggaaccggaagatctgttgcagcttattcttgggatgagtgataaagtttttttcaattcactttttgctgatggcctgacacaaaagccagaaactctaaatacgtggttcgattctagagcagggaccttcggtggtcagtcagccgtcagcgtggttaaaggtcttgtaggccatgcggataagttcgagtatcagaacttagatgaggttccgaagcttgatcttatccatatgtatggtttcctcgagaacatgctgaaattgaatggacaccgtctggacaatgataagggtgttcttagctttgtcactcccaaagactggatcacacagtttggtatcaagaagaaatataacaatatgacttttgaacgtgttcctacagagaaatcgttagaagtgcttgggatagggcatgtgattattaataatgctattaatcaggctgagaaatttaacgcctctacggcagtagcaaggggtatttcctcagctttactgatttacacattgagagaccagattactggcgatagtaatgtacaatcattttcagttgttggagtggtactggaagataatattcaaattttggtcaacgctgagttagtcaataaactggcttttatatatgacaacctacctaaaggttcgacggtgattaagcttgacagtgcattccatgttaattttgagagggatataaagcgtgctgaggccgcattagatctctttattcctgggttgaatttaccctatgagcaagtagtatggcaacatacagcaacttttttgccacagtaa

SEQ ID NO: 400 - DNA, 10210 bp, Vibrio harveyi
atggcgggtgcttcaatagacgctattggtgtgattaaccaaatcaaagacaacttaacagaccgatacgaggatggctttcctgtccttaaagagatcattcaaaatgctgacgatgcgggtgcgaacgaattaactattggttggagtaaaggtttctgcaatgcagaaaatgaactactcaatgcgccagcgctgttttttatcaatgatgcaccactggcagaggaacaccgtgatgccattttatcgatagcgcagagctcgaaagctacatctaaggcatcagttggaaagtttggtttgggaatgaaaagtttgtttcatatgggtgaggcattcttctttatgtccgatcaatggcgaattgagcattgggcgtcagatgttttcaatccatgggataagtatcgtgatgcatggaatgaattcggtgaaaatgacaaatgccagatcgcaacaaagttaaaagggtttttaagtaccgataagccttggtttgttgtttgggtcccgttgcgtacaaaagcgctagctaaagcacacaataactacattatcatcaacaactttagtggtgatgaaaaactccctagtttctttaatcaggctcacttatcagagaaaacttctgagattttgcctcaactcaagaatctcaaagacatcggctttttctgcgagtctgacaagggtgtgtttgatgaagtgacctccatacagttacatgaagattcgtctcgaagctctttttgcggtgaaccgcgattaaataatggagactcttttgcagtcttctcagggaaaatctattcaaattcgaatgaagagcgttgtgcactggactatgcaggatgcgagcgagtcatctttgatgagcgtttaaatcaattaaaagacgaaaatatggggtggcctaagagttatcagttcgacaagaaagcgaacttgcctgttgaggctctcgacaaagctgaacagcatgcttctgtaacattttcgcgttttaaaacaaaggggcaagcgtacctcaaagccaactgggctgttttccttcccttaagccaaaccaaggaacttgttgctgtgcctatcgagggggagtacgactacaatctctatttacacggctacttctttgttgatgctgggcgtaaggggttgcatggccacgacaatcttgggttttctacctccctagagcatgtaaaaaatgatgagaaaaagctgcgtgaggtttggaacatcattctagccagtgaggggacattcaacctcgttttaccggctctaaatgagttttgtcagaagttaaggctgccacatcaaataaaaactgttttgaccaaggctttgtacgatctcctcatagaaagatatagaaaagaagtatccaagagcgccaattggataatcaatatcgatgacaagggggctgcttggtctttacttgataagaatgcccaatgcttaccgatccctcgtccagagaatagtgattactctcgaatttggtcaacgttgcctggtttgagtaagttactggataaaaagtcactgtatgaagccacgggtaatgaatttttaaccgagcagaatcaacgtgatagttggaatattacgctcctggaagaagcgttaggaagtggtgttgtcaacgcattttacagatcaatcaatattgaatatctgcttcagttccttcaactagctaaggagcagtgcacgacggaagattttgataacctgattattccacagttccgagaggtattgtctactcataagcttgctgaactttcattgaacaaggctcttaacacgcaagtttttgagcttgttagcgcacctaaaaccgtcgtactaccaattgataaagatgatcaatctatttgggaacttgtctgcaagatcattcctgcaaagctactgctccctaaatttctgtctactcacaataagccaattcatgacaatgtcactgaagaagagctcttcgcacttttaaccctagtagatagctacatcaaaaaacagggtgaacgtttatcctctgatgaatcgtctgcctgtgagcgtctcattacatttgttattgattgtgtaaatgcaagtgaggtaatccaaaaaagcgatttttatcagaagagtgggcatttaaagcttctaaaagtggaagctcttggttcgcaacagagcacaaaatatcgctccttaaacgaactcatagtgttaaaagaaaaataccagctgtttcttcgtggaggggagcggaactttggtaaagggttggggaaagagctagttgcagtcgtgcctggcttggagctttgttttataagcaaggattttgaaattggtggcctatatgaagggcttaccgcttgttctgaagccgcgtgcctacgactgctttccacgtacccaaatcttggttcaaattcggcaagactagcgctcactaaagtattctctgccgagctctctacagatgaggagaaaagaggtttccggtatttgattcacggcagcaaagaagacgacttgagacaaacgctttggaagccaaacagggcaactaacccagtatggatgaaaatttggcgtatgtgtcagccagaagatttccctggatggtgtgagttagatgaagagttttctaatgctttgacaaaccagtacgaacattttattggcgttaaagagcagttctataaagacattatctctgaatacagaacaatactgcctgaatgcaattttgataactttgatgactgggaagtggagcaactgctcgcagatattggtagtcaaggagatgaaaggctatggaaagcgttgcctgtccataggacagctcataacactagagtcgcgattacgaccaaatgcctgatggaaggaagtgcaacagttccaagtgaatgggatgttcaccttattcaacattcagccattgctgaagtcgccgcttgccagcataaatgggtgaatcatggtctacctaaagagctgatcgagattgcgcttacccaatcaagtccagctcagtattccgcatttattttggaccagctctgcgctattcgtattgcgaatgaaggaattgagcatgagttggaaggcaagataaataataccaagtggctgcgattagcgtcaggaaccgaggtttcaccggaagctattttatctttctctgccaatgagctgcctgagtctgcaaagttctgcgagttaaaagagtcaaacatttacatgttctctcaactcgatggaaacatgtttgagcacgatcaagcacgtggtttcttgagagagtgggtcgcaaaaagtaacagctcagtttgctcgtgcattttggcagaagccgcgcaacatcaaagttatgtagttggtaatttttccaacatttctgctcaggtgctagaacagatttcatgcatcccgccattgatgcagctatctgcaggctggggcttactggttgagctctaccaaagccaatatctttcagtgaatgaaaacaagcaagtgatgctatgtaaggaaacagaaccacaatcattatggtgggcgctggagcgtattgctgatgatgatattcacggtcagtcaaaggaacttcggaaagcatttttagaagcgttgtgtaacaccgagggaggcgttgattatcttcctaaactgagatttcgcaatgagaacggaagttatgtatcgggcaacacactggtatcgaatgttgctcaggtagttgctgataacttaatttcgccacaagaatacgcagtcattgagagttattgcagtaaatctgctctcacgaatggtaatacgtcaaaaatcattgagttagcgggcgataatgcgccagtacttagtgattacttcgatgactgggaagggatggttccccctgatgccatagcgacatttatagcactgtttgctaaatctggtggcgtcgagaaattggttaacaattatctaagacagtcaacgctggagtcgataaagcaggggtatgaggaaaagtggaactccggaaagggacgtagaggcgaattttcacactatccgtatagctcgttatataaaagtgttgattttgaactggcaatttgtgcagaaaatgcggcgtacatgacgtcgattttcggcgaaagaattcaagttaaattacaaaaaacaccagattcattgcttgttcaccaagcgaacaagtccaagacgaaaaggatagagcttcgccgagttgatacaaagaatgtatcaaaagaccaacttctccgcatgcttgccaaagctgtagaaacgatttttactgatgtgtttggtgcagagtgtattcgatttgaaagtgaatttttgaagaggtttggtgcttcagaacaggtagatattcagattacccgacagatagtcttggagaatgttgtccccctacttgaaaggcttcaagtgcgagaagaaggactttgtgatttacgttcagattacaaacgtgaacagcgtgttttggcgagcagtgatccttctgtactacaagatcgctcacgccttaacagcgtccttacgaagattaaagagactcttgaaaataacgaaaaagtgcaatctttggtactcgaatctgtacgaaaagagatgagtaaacatttccaatactcgcctttcagcgtgccatttgagctgtttcaaaatgccgatgatgctttgtgtgaacttattgaaatgcagggcgactcaaccaatgtactgactcgatttgatgtggtttctggcagtgatgggactcttaacttctaccattgggggagagaggttaactactgtaaaagttcatatgtcgcaggcaaaaaccaatttgaccgcgacttagaaaagatggtgagtctcaacgtttcggataagtcagatggaaaaacaggcaagtttggactgggctttaaaagttcattgcttcttaccgacattccacgtttggtgagtggtgatatttgtgcagaaattcatgctggcgtattaccgagtgttcctagcaaaccagtgatgacggaacttaatcaaaatgtcgatgagtataaaattggaaatcgtaaaccgacattaatccagttgcctaaatgtgataagaagcgggcagatttgaagttggttttgggacgtttcaaaagtaacgctggcattctcacggttttttcacgacaaattcgagaaatcaatattgatgagcagcgatttgggtggtcgggacaggctctccataatatccctgaagtacttgtcggtgaagtgaaactgccaacaaatacttctgaagagtctaacgttatccttcgaagtaatagagtgcttattatcaataccgagtccggtcagttcctttttgctttggattctaacggagttgtttctctttcgaatcgaaaaaacctaagtagcttttgggtgttaaacccgattgacgaagatctgaaattgggtttctgcatcaacgcgccatttgcggttgatattggtcgctctcagcttgctgtagataacggagacaatatcgatctttccagttcactcggcaaagcgttatcagctgtgttggtcaaaatgtttgcagcttcttcgaataattggaatgaatttgctgaagaggttggcctgggacaaagcagcacatttatcaagttttgggcgtcactttgggatgtaataacagcccattggccagcaaggcttggagagacgaactctaaagctgaactgattaaacaaatgttcacagtggaagatggtctgcttgcgttttaccagagatgtgcggctcttcctcgaaatcttggtgtaaaggaagattctcttgttcaacttaaaaacgttgatactggagcgaataaacctttgaccaaggcatttaataccttgggaaatcacccgatacttcaacggctatataaagaccaacaactcgtcgggcatgacacctttgagtttttgaagagtatcgattttagaccgaataatggtgcgttaactaagctcgaattgatcgatttgattggacaggactttcctcacaatgaagtaaaccacgacagagcaagtttctatggtcgcctatttggtaaaaactttgaaaagttaatgtcgaattttgaaatgacagtgactgagaaaaaggtgttggaagagcgtttttctgaattgaagtttctcaacaaaaccggtgtatacgtgactgcaagcaaactgattgttgaggggagccctgagagagacttgctatccaagtttgcaccagacagcgcgaagttaagtgaaaaatatgaccaagcatcaatggacttggttagcttcattcgtcgtgacgtaagctatgacattcattcatgggctaagcaaataagatctgaagaatctaacaggggaggaaagcaggaagggttgtgtagcttccttgttgaaggcggctatttagcatcatcgcttctcagaaaactacagacggatcaccccgcgtttcttacaaagggacgttttgatccgagcgtattaacagaaaaatggcgttggagttcttcaaaggcttcggctttcattagcatttggattgatacagaggaagataaagcaaggcacgtacgacaagcgcaaaaagagtttattccgaatgtgaccaatggtgagcagatcctcgaaaacatcacgaactggtggaatcaatgtcgtaatcaaagcttaattgattatgacaaacagctctatgctcaaccaatgccttggaaggcaatgacagaggacttcgagcttgaaacgttagaggttcgtaaaggttggttgaagttgttctatttagggagttgccaaacattaggtttcaataacgatgtagctaatcggaatgttgtttcttggttcgaggacaaggggtggtgggataaactagccgttgccaatggtcctagccctgaagtatggaaagaattaatggaagaatatcttcaaacagcacgcgttgatgagcgttatagagtttggattcaagttcttcctttgtatcgctttgctactaagctcaaggactatgtcgctctcttcatgaacgcttcctttattgataatcttgatgatttgttaaaaccaaatagttcaaacaagttatcaggctctggcatccaagtatctgagttaaaaggaacgctcggtattgggattaatttcattttacgagagttgcaaaggcaccaagttttggagcgtgagtattgtgaagatatccaaaagtacgcatttgttttgcctgctcgattacgaaagttactcaaaaaaatgggagcaggtttaagctttgacgcagagccagagaattcagagcgagcttacgactatttcgtttcggcattaaatagtgaaacccaccctcttcttaaggactttgacatcccatttagagtcttgttggctgataagcaagcgtttgaacgttgttttaattttgctctagatgagcagtttgaggaagtatatggataacattatacgcgttattcacccaaaattcggtgtcggtaccgtcgaattcgaaaaagctgagacatctcttgtccgatttgaacatggttttgaggagtgtttgaaaagtgagcttgaggcggtcgctgatcttaagtccgatcttgtttctggacagagtgtcgctgcctctgaacttgcgttaaaaacattagcgcactcactaaaaagtgttaatgaaaattggagtgttttttctaaatcgaacattaatttacttcctcatcagttatgggtatgccatcgagttctaaggcaatggccaacaaatcaactgattgctgatgatgttggtttaggtaaaacgatagaggcgggcttgattttatggccccttatcgagaggaaaagagtcaagcgtcttctgattttgacgccagcacctttggttgagcagtggcaccaaagaatgcttgatatgtttgatattcgtttgagtatgtatgcaccagaaaatgatacctcgcgcgtcaattactgggactcaaacaatatggttgtcgcttctctacctacgctaaggaacgacaagaatgggcgtttagagcggatgttaaatgctgagccgtgggatatgctcattgttgatgaggcgcaccatctaaattcaacggaagataagggtggaacgttaggctttcgctttatacagacgttgattgaaaatgataagtttgaatcgaagttattttttacagcgacgccgcatcgaggaaaagaacacggattcttctccttattgcagttgctgagaccggatttgttcaacgttaagcaaatggatgagcgagaaatgcgcccatttgtgaaagatgtgttgattcgaaacaataaacaatttgttacggatatgaatggtgagaggttatttaaacctctgtctgtgtcctcaagaacttacagttacagtgaacaagagcaacatttctatgacctcttaaccaagtttattgtatcgggtcaagcgtatgcatcctctttgaattcaagggatcaaagagcggttatgttggttcttaccgcaatgcagaagctcgcttctagttcaattgcagctatcgagagagctctaaaaggacggatagagaaacataaactaggtaagcaacgtcttcaggatattgaagttcaacaggctgctttattagaaaagcgtgaggagtcagaatcgcagtctgaaagcgagatatacagtgatgaattagcgcaattagaactggaatttattgaaacgacaacgcgggttcaattgatggatgatgagctccctagaattatggagttgttgtctgcttgtcagaaagttggctctgaaacaagaattttaacaatattagatatcctagaaacggagttcaaagatagaactgtcgtcttttttactgagtataaagctacgcaagcgctattaatgggtgctttgaataaaaagtatggtgaaggctgcgttacttttattaatggtgaaaatcgtcttctgaatgtagagaatggctcaggagtatgtgttgattatgtcaccgatagatacaatgccgcgaagcgttttaatgaaggcaaagtacgatttataatttctacagaggctggtggtgaagggattgatttacaacaaaattgtttttcaatgattcatgtcgacttgccttggaacccgatgcgacttcatcaacgtgtggggaggttgaatcgatatgggcaagtcaaaaacgtagaagtaatcactcttcgaaatcctgataccgtcgagtcaagaatctgggatttgctgaatacgaagatcgatttaatcatgcgttcggttggcggtgcgatggatgagccagaaaacctaatggagttgatattaggtatggcggatagcacattgtttaatgagttgtttacagaagcagccaatcgtaaaaactctgaatctctctctgcttggtttgaccataaaacaaaaacattcggtggcgagtctgtagtgcaaaaagtgaaagacttgattggtagagcagaaaaatttgactatcaagatcttgaggctgtaccgcgtttagatcttggagatttaaaaccgttttttactcagatgctttcatttaatcaaagacgttgtaagtatgatgaaaatggtggtttatcgtttttgacacctcacgcatggttggggcaatttggaaccagacgctcgtatgagaaattgcattttgaccgcaaagctaaacagcttgattcagaagctgacatcataggctttgggcatcccatgttttcaaaagcggttaatcaaggagagcaaatccctggaagttacgcgtttcttaacggtatagagaaagatcttgtagtgtttaaggttcaagatcaggttacgggaaccgatgcatcagtaaaagtgagtattgttggactggtgctcgatgataatggcgattgtgaattggtcaaggacgaagaccttatcgggtatttaaacgagtatcttaaaatttccaatgatgttgactctaaacgtacaccagaggatttagtgtctgttattcaaactgctaatgattatctaatggagaatgtgtcatcaattggcttaccatttaggctgcctaattctgaaccattaacggtattctacaaagcaagtaactaa

SEQ ID NO: 401 - DNA, 5918 bp, Raoultella planticola; identical to SEQ ID NO: 40

SEQ ID NO: 402 - DNA, 12191 bp, Obesumbacterium proteus; identical to SEQ ID NO: 49

SEQ ID NO: 403 - DNA, 6873 bp, Escherichia coli; identical to SEQ ID NO: 50

SEQ ID NO: 404 - DNA, 11931 bp, Plasticicumulans lactativor; identical to SEQ ID NO: 52

SEQ ID NO: 405 - DNA, 11041 bp, Yoonia sediminilitoris
atgtctctggttttgaagacggttcgggcttttccgagaggtcggactaccgaagaattgcttgttctcgtcggtgcggctttctcaaatgacaagcggcttgcggctctcagcgaactggagacgctatttcgcgatggtttgatagtgaaaggcaaggacggtcgctggcgtgcaaaggcagatggtttcaaacccagacatgagagcgtgtcggcttcgagaggtggagggcctgagggcttcgttgatgtcattcacgctgccaatgcattcttctcctcggaaccgacggcggccgaactacctgatcaagaagacgaaagttcagatgctcccgatccgcaagcgctactgagatattggcgctcggccttgcgtgccgatccacgaggagccacgacccaggttctcgacaaacatggaatcgagtgggccttgatctctgggcgtggccctatcggtccagaagaagggcaaacgctgactgtttcaatcgaactcgacgcgattgatcctgcctttcgagaggctctggtgcgaagggaaggtcacgagaacgcgcttgcagtgggttggccgatggcggtcggacgacgtggcggagttcctgtctttcgacccgttggcatgttagcagcagcttgggatcgtaaggatgaccgtctaatcctgacgattgatgccgatgacgttttggtaaaccctgattgggtcaaaagtgccgctcgtgccagcggctggaagcgcgacgacctcgctgacctttttttcgtggacgatgggctggggctgcgggctcaggattttgtggagaaggtaaggattgccgttgccagtcagatacgtggtcgcgttgtcggcgagaatctcgccacacagctcgatgcctcggctcaagggatttttgacagcgccgcgatcttcctaccgactgactcttctttcaccgcgggggctgctcgtgacctggatgccattgcgacatggccgaaggaccgccttgagagaactgcgcttggcgcggtattcgggtttgaccttcaagacggcacggacaaggctgctgcaatcgacgcagttccgctgaacaaggaacagttgcgcgcggttcgatccgcatgccaagcgcctttgaccgtcgtgaccggtccgcccgggactggcaaaagccaagcgatcgtatctatggccgcgtcagtgctcgcagatggtggcagtgttctcgtcgcctccaagaaccatcaagcgcttgatgctgtggaggaccgtcttggctctcttgctccggacgtcccattcgccatccggacactgaacccgaatgacgaggcggatacgggcttcaaggacgccctcaaacaactcatcgacagcgaaaatgtgacgcgcaacgcatctgtcgacgaattcgcattaggcgagctcaaaagcgacgcgatcgcgagaagcgaagtggttagcgtgatcgataagatcacggaaacggaatgcgaaatttccgatattctggaccggattcaagtccgagaggatcgcgggcgccctgacaaccaagactctgaagacgtggatccgagacaaagtctcttactccgctttgtctcttggtttggatcgcttttcgccaagcgtccccccaaagtagcgccagtgacagatcattcttcgtcccgccgcggaatgaacgtcaaagagcttcattgcgcgctggcagaaaaaagatatgaacgcgatgcgctcgggacacctgacgatccgatcgccttaggcgagaagatccgggaagcgaccgagaatcttctgcctcgcattctgtccgcccggacacatctcccagaggatgagaggcgcgaaatcgcagaactctacgatgactggacattcgacgggggacggggacatccccctactgatctttcgcgcgtcctcatttcgcatcggcctttgtggcttgcatcgatcttgggcacgcctcgacgcatacctcttgatgacgggctgtttgacctcgtgatcttcgacgaggcgagccaatgcgacatcgcgacggccgttccgttgctggcgcgcgcgaagcgggccgtcgttgttggggatgatcgacaactgtcattcatccctcaactgggtcaggcgcaggatcgcaatctcatgcaggctcagggcctaccggtcgccagaatgggccgtttcgcccagagtcgccgttcgctattcgatttcgcatcgcgcgtgtctgttgccgacaacaggattactctgaggcaccagtatcgttcagcaggccccatcgtcgattacatcagcgagaacttctacggaaaccagttgcagacctcgtatgacccgaggcgactgaacgtgccagatggggtgcgccctggcctcgcatgggaacatgttcctgctcccgcggtcccgcaaatgggcaacgtcaatccgtcggaagtaagcgcgattgttaggcacctgaaaaagctgatcgttgaagacaaatacactggcagcatcggtgtcataacgccgtttcgcgctcaagtggccgctatcgagaacgcggtcgatgccgtcctggatgaaccgaagcgcattgcctgcgagctcaaggttggcacagttgacggttttcagggacaggagcgggatctcatcatgttctcgccttgcgtcggtccacgcagcccgcagtctggcttgaccttctttcagcgagatacgcgccgtttgaacgttgcgatttcgcgggctcgggcggtcgcgatgatcttcggcgatcttgattttgcacgttcagggcaatcaaaagcgctggccaagctcgcttcgagggcgacggaagcgcggacgaaacggggcgaaggtgtgttcgacagcgattgggaacgcaaagtctatcacgctctgaaggcccgaggtctggatccgcagccgcagcacgaaatagctgggcggaggctggacttcgcgttgtttggagcgaatgatgtaaagctcgatctcgaggtcgacggacgcagatggcacgaaagcccagacggtcgtcgaaagacgtcagacctgtggcgcgatcatcaactgaagtccatgggatggcgggtgcgccggttctgggtggacgaactttcaagggatatggagggttgtcttgaccgagtcgaacaagacctatcgtaagtcgagcaggaacaccgcggttgcgttggggctgggtggcgccgccatccttgcctcgggctttctcgtcctgcaagtcaactcgctcgatcgccgatatggtcgtatcgaggaaaatctgagctactacaccggggaactccaatccgcgcagcagcaactggcttttgctcgtgagcagtttcgcgaactttctgaccaaaagcaaagcttgtctcaggaagtcgcgagcgccgaacgcagccttcaaagcgcggctcagagagaggcggatgcgcaggctagtgtcgaagcaagccaggccaaattgactgctgagcgggaccgtttggccgaagcccaaaaaacgattgcggatgcgcagcgaattgaacgtgaaactgctcaagctttgctgcgaagaaatggcctcgaaacagaggtggtcaaactgaaaggcgatgtgcaggcccttaaggagagccagcaagagttgtctgctggtgttgaccaaacgcaatcggctgtcgatcgcctcgaagagagaagagctgaacttcaacgtgaagtggatagactcgcgcccgccgttgaagaccttcgtgcacaggagcggcttgtcgaacaactgcgaggtgacgaggatcgtctcgaacagagcctcgacgatttgaatgcgaacattgcaattgcacggactgaattggcgaccagcgcggaaaaggtcgatgcggccgaggagaggctgcgtgcagggcaggaacaaatagcatccacagaagctcaacttgaaacactgaatttcgaagtcgatgacctcgagtcgagacagggcgaactgcaggcaagtgtctcgggagcagagacgcgtctttcttcattgcaaaatgaactggagatcgcacagaacgcggtgacgcgagctgatgcgcagcgcgctgaaactacagaagcactcaacatcgctcaggaacagttttcgacgcgaagcgctcagctctctaccctccagtcgcagattgcatcggcagaggaagagcttgccgaacttgaagagagacgggcggaattcagcagattgcaggctcaaatggaccagctgcaagcacgtcgaacgacactagaggaggttctccccgatcttgagaagcgagttcaagcagagcgggctaatttgggttctatcacgacagaagtggagacagagctcgggcgagttgctgtactcaaaggccagggttccagtctggaggccgacatcgagcgcctccaagagcgtcgcgacgaactcgggctggaaacgcagtccgccactgctgaggcggaggccgcgcgcgcatcccttcaagctgagcttggtcaacttgcggaaaccgatgccctttcaagagcgcggactgccgatttgaggcgcttgagagaagctcttggagctgctgaaagagagctttccgaacttgaagagagacgggcggaattcagcagattgcaggctcaaatagaccagctgcaagcacgtcgaacgacactagaggaggttctccccgaacttgagaagcgagttcaagcagagcgggctaatttgggttctatcacgacagaagtggaaacagagctcgggcgagttgctgaactcaaaggccagggttccagtctggaagccgacatcgagcgcctccaagagcgtcgcgacgaactcgggctggaaacgcagtccgccactgctgaggcggaggccgcgcgcgcatcccttcaagctgagcttggtcaacttgcggaaaccgatgccctttcaagagcgcggactgccgatttgaggcgcttgagagaagctcttgctgctgccgatgatgagctttccgagacacgagcggaactgatggacggacagtctgtggaacaggaaccagtatcaaccattagtgaaggcgctggcgcccgtgaaaacgctcagtctgacaactccgcgccatcgagcaccgacaattgaggtaaccgaaaatgcttacggacaatacaatacttgtgctggcgattgcgggtgtcctgatactgctcgccgtggttcaactttttctggccgcccgccacgaccgggcggttacggcagcaggcccgatcgaagagcttgccgtctacgagaagcggctggaagaaaaacagcggctcatggacgatcttgaagctgaagtggaaaaacgtcgggaggcaatggccgtcgttactgacctccgggctgaggtcgacggtctacggcgtcagaaggaggagctccttacagaatgggagagtctccgtgaacgtcgcgacgaagttgcggcagttcgcaaggagactgaggacgccgttgtcgaacgccagcaactcgaaacggagatcgccccgcttcgtgcggagtatctggagataaaggaaaggctggaaaaggcggaggagctcattgagcgcactgacgccttgagacgagagcacgacgaaatctccacacaggtcaaagatcttcgggacaagaagaggcaacttgaagaggccgaggaacgggtttctcgcctggaagagcgttccttcgaacttgagacatcgaatgctcggcttgagggacagaagtcttcgcatgaaagcgagttgtccgccttggaagcgcggatcgcctcggaacacggtgggttggcatctgcccaaaccgaacatgctcgcctcgatgcagaggttgcggctctgaaccaggaaacccgccgctccaggggcgaaatcgagacgctccaggacactcgaagcgcgcttgatgctcgattggcacacctcaaggccgagatagctcgccgagaaggtcgaaccgtcgacggggaaaccggcgaaacggatccgcttcgcgagctcaatgaaacaccaccggtcattacggagatgaggacctgggacaacgcgccccgcgagaacgaggcggatgccatcaaacgcgtcgaacgccgcctacgcgcaaagggtctcgactacccggctcgcacgcttcgcgcttttcacaccgccatgaaagtaaatgaaacaacgcagatggcggtccttgccggtatttccggaacgggcaagagccagctcccgcgtcaatacgcggccggtatgggcatcggtttcttgcaagttccggtgcagccacgttgggatagtcctcaggatctgatgggattttacaactacatcgaaggcaagttccgacccacagacatggcgcgtgcgctttgggcggtcgacgggcttaacaacgacgatgcggaacaggatcgcatgatgatgatcctgctggacgagatgaacctcgcaagggtcgaatactatttctcggacttcctcagcaggctggaaagccgtccgcgtcccgatgacgtcgacaatgaaaacgaacgcaaggacgctgtgatcgagcttgaaatcccgaacatggaacgcccccccaggatttttccgggctacaacctcttgtttgcgggcactatgaacgaggacgaaagcacgcagtcgctatccgataaagttgtcgaccgtgcgaatatccttcgtttttccgccccgaagaaaatcaaggacggacaggcagaaggaacggtcgagccgattttggccctttcgcaacagacatgggagagctgggggcggtcgagtgcgtctgtcgatggcggtcggcgtgtcaccaaccggattgaacaaatggttgatctgatgcgtgacttcaaacggcctttcggtcatcggctcggacgcgcgatcatggcttacgcggcgaactatcctgaggttgaaggcggccgcggtgtcgacgacgctctcgcggatcaattagagatgcgccttctaccgaaactcaggggcgtggaaaccgacatggctggccctcagttctcgaggttgatgacctttgtggaacgcgagctgggggacgacgccttggcccaagcaatcggtgagtcaatgtccctcgccgaggcaaccgggcagttcgtatggagtggagtcacgcgttgatgcggtttctggcccgtccctgggcggcgaaagcccttggagaggacgaagcctttgggcccgaagactgtctgatcggtagctaccagggggcgaacccaggcggctacgaatacgtgacgctcttgaggggaaacgtccgaggtagcgataccggaactgttctgtttccctatccaaagcgtgaggaagctgtcgggcccgcgcgtaagggcttcccggtgcgcccaaggtcggggcacgatcctgccactccggacgaagaagaaggcgcagaggcccttcgacacatgaacgaagttcttgcacgtatccaagaactggaaggtgcgattgaagacccaagcgatacatgggggcgcctgagggatgcttggaagcgcgccgaaaatgaagccgaacccaaaatggctgaaatcgtccggcaggcgcggggcatgcttccggtgcttcgcgatctggaaaaacgcatccgccgggttctacgtaggcacagggagctaactccccttgatcgggtgcaggagatggatcggacctctatggtgtggctcagccgacagccagggcgaagcatcgcggaacgtgcaggttcttcgcaacgaattcttgcgacggttcgccgtgagaatttcgatacgctcgagaaccgtgtcctgcatgcctacacgcgtcttgccgcagatgttgcacgcgaatggacccgtgagcaccctcgtgcgaaggacagtgttcgctacaaacaggttgaggcttttaggaaggcctgtcgagtattgtcgcgaacactcagtgacctcggtgtcatgatcgcgtcggccggcgtccagccaaactatgtgctcatgcaagatcgcagctatcgagaggttcatgagggatggctgaggcttctcttacgccgaaaaattgtagatgatctttgggcttggcaggccgaaacttggacggatttctccgttctttcgatcattcttgccatcgacgaattggaagaggctgaacttgtcgctcagtcgccgatttcgtggagcggtgaggcaacaggcggacgctggttcaatcaggatcggccaatcgccgtcttttggctgcgcgacaccaaccgcattgttgaagtccaagcacgccctgagcgaccaggaaccatgttgagcgcggcacaagcgcacgtcgccctcagaatttccgatcccaaacgggctgaccttccgcgcaggatcgctgtctggacgccacatgccatgcgtagaattgatctcgaggatactgtgcggggggcagttcaactgcttcaccaaatccagcccctcgctcagacggaagttttgcggaatgggttgatcatgaccccagcacgtggtgtcgcagctgaagagagcgcaactcacggaagagcgatcgttacggcaatcgccataggcccagccggtgaagacctagcgaagggattccaggccgtgcgcgacttcattcgcagtgagctatacgaggtcgcaacatgatcgaccgaaaactatgcggcttcgatctcaacggatggagagatttcgttgcgaagaactggcgctccgtgccaggtgaagacgaggtcattggtccgaccgatatcgtcacaagtggccctctttcgtcgatcgtgcggatcggggaaagccgcctcgcaggttggatcggaggaccgcaggctgacattgctccgcacggtcgcggtggtggttggggtgatgtcgggtcagaacaaagacgcattcccgttcggtcactgctggaaatgcgtgatgacggggtcgaaaaactcgcccaggcacttgtgggatctgcgagcggttcggcaaacacagtcgtttcgatcgatgagggcccggatggcgatgaagccgtccaagagcaccttctcgaagcacttgcccgagggaagttccgaaatggctcattggtttggcgaccagttcttgccgccttgttcgccattcatcgcgatcaggtttcggaggggcagcttgtaggcgtcgtctcccatcagcgccaaggcttgtcagttcaaaagctgcgtattcgtagcgcaaggaatgtgctcgccccggagcgacgcgaggccgctgcccatataccgtgcgacgctggttacgagtccctattccgaggtgcccgcaacgccgctgtcggggcagagggtttttcggcgcgcacagctcatcgtgcgatcgcaagctcggtcggaaaagctggtttagggatggattgcaatcctgagatgctccgcatgcccaacggcgattgggagctcttggaccttaataaatttgacgcgtcggaagtggtgagtgtcccgagttccgagctcgatctggccgattgcgacgtcgttcttttcgagaccctttgtgaaggtcggctcaaaaaatgcctgagtgatgctatccaaagagcagctccagtcgaggtgctctctcttcccgcaacggctgttgcggaaggtgccttggaagcagcacgccgagccggggacggggaaccgatcttcttcgactttctaccacgattgtccaccatcgtgttcggatcggatggcgcaaagaatttcgatctcatacggaaagaagaaacgctcgaagcaggccggacctacagaagccctgaagcagcatctctcgcgataccggcagggcaggagagcgtctctgtctacctgaggaaagaggaagctccctggcctcgaaaggcaagggtgtcgcttggagctcctctgaagcatcaagctgccgtctcgctgtgggtcgaacagaaaccggccgccgggcgagcgcggatcctcatggaatcgccggacttggggcggaatttcgcggtggattgggatgaagcactggaagaggaacggccctggtctgagatcatcgagagcttggatacgcaagtgtcaattcccaaacgtctggttcttccctgcggcatggaggcatggcatgacagcgatcgatccgcaggtatgctaactttgctcgaatccgagcctaatcgcagccgcacggattgggcgacccttcggcaaaaactttcacagcgtccctttggcaaatactgcatctcaagtgacggcgacgtgcctccggagatcgcggcagaaaccctcgagcggtttgaaattctgaccagcaaagcgcttgaggttactgaaaagcgcctgaggggcgaaagcggctacggaacggaagacaatgaggctctcaaattcttgagttggcagttccgccgatgcccgcgcgatgtcgcgacgtggctgatggactgtattgaagcgtccgggcgcaaccatccgttcgtcaaacatcaagcaagttgggttctcgtatatcagggccttggccgcatcgtcggaaacgaagaggacgaagcgagagcaatgcggttgcttctgacttcgtccattgaggactgggtctggaaccgacaaagcgcggccatggcgttcatgctgtctcgttctgacagcgctccatcttacctggaacgagaagacgtagagaagctgaccaagaggactatcgcggacttccaacgtaatatcggcggccaatatacaatgtttaactacgcgcctttcttacttgcaggcctgataagatggcgtctcgttgatcctaaagctttggtgatcggggccgacccgttggcggatgacctcttggctatcattgagaaaacagagcacgacctgaaggcccgttgtgggtccaatatgaatttccaaaggcggcggtcgaagttcttgcctatcctccaagacctgaagtcagagctggcgggagaaggttcgaatcctgacctgttgttggatatctatggagcgagcggaacgtga

SEQ ID NO: 406 - DNA, 4789 bp, Pantoea cypripedii; identical to SEQ ID NO: 53

SEQ ID NO: 407 - DNA, 4577 bp, Escherichia coli; identical to SEQ ID NO: 55

SEQ ID NO: 408 - DNA, 11911 bp, Pseudomonas aeruginosa; identical to SEQ ID NO: 59

SEQ ID NO: 409 - DNA, 11635 bp, Aquimonas voraii; identical to SEQ ID NO: 60

SEQ ID NO: 410 - DNA, 5424 bp, Klebsiella oxytoca; identical to SEQ ID NO: 64

SEQ ID NO: 411 - DNA, 4088 bp, Pseudomonas aeruginosa; identical to SEQ ID NO: 70

SEQ ID NO: 412 - DNA, 3637 bp, Klebsiella pneumoniae; identical to SEQ ID NO: 71

SEQ ID NO: 413 - DNA, 6037 bp, Escherichia coli; identical to SEQ ID NO: 72

SEQ ID NO: 414 - DNA, 2392 bp, Artificial Sequence
  Synthetic
atgaaatcatatagagtaaatttagaactttttgataaagcagttcatcgagaatatagaatcattcaacgctttttcgatatgggagaagccgaagaatttaaaaaccgctttaaggatattagagataaaattcaatccgacaccgcaactaaagatgaattactagaagttgctgaagttattaagcgtaatatgaattaatgaggaaattatgattatcaccactgaaaaagaaacaattcttggtaatggttctaaatcaaaagcatttagcatcacagcatctcctaaagtatttaaaattctgtcatctgatttgtatacaaacaaaattcgcgcagtagtccgtgaattgattactaacatgattgatgcccatgctctcaatggaaatcctgaaaaatttatcattcaagttccaggacgattagatccgcgatttgtttgtcgagattttggtccgggtatgagtgattttgatattcagggtgatgataattctcctgggctgtataattcatacttcagttcatctaaagctgaatctaatgatttcattggtggatttggtttaggttctaaatctccgtttagttatactgatacgtttagtattacttcataccataaaggtgaaattcgtggttatgtagcttacatggatggtgatggcccacagattaaacctacattcgtaaaagaaatgggtccagatgataaaactggcattgaaatcgtagttccagttgaagaaaaagactttagaaactttgcttatgaagtttcttatatcatgcggccgttcaaagatttggctatcattaatagtcttgaccgtgaaattgactattttccggattttgatgattattacggcgtaaatccagaaagatactggcctgatcgtggtggattatatgctatctatggcggtattgtttatcctattgatggtgttattagagaccgcaactggttaagcattcgcaatgaagtgaattacattaagtttccaatgggttcacttgatattgctccatctcgcgaggctctttcacttgatgatcgtactcgtaaaaatattattgagcgagttaaagaactcagtgagcaagcatttaatgaagatgtaaaacgatttaaagaatctacatctcctcgtcacacatatcgtgaattgatgaagatggggtattctgctcgagattatatgattagtaattcagtcaaattcacgactaaaaatctgtcatataagaagatgcagagtatgtttgaacctgatagtaagttatgcaatgcaggagttgtgtatgaagtaaatcttgaccctcgactgaagcgcattaagcaaagtcatgaaacttcagccgttgcatcaagttatcgtctgtttggtattaatacaacaaaaattaatattgttattgataatattaaaaatcgtgttaatattgtccgtggattagcacgtgcgttagatgatagtgaatttaataacactttgaatattcatcacaatgagcgtcttctgtttattaacccagaagtagaatcgcagattgatttgcttcctgatattatggcaatgtttgaaagtgatgaagttaacattcattatttgtcagaaatcgaagctttagttaaaagctatattccaaaggtagttaaaagtaaagctcctcgtcctaaagctgctacagcatttaagtttgaaattaaagacgggcgctgggaaaaagaggaactatttacacttacgtcagaagcagatgaaattactggttatgtagcgtatatgcatcgttctgatattttctctatggatggtactacatctctttgtaatccatctatgaatattttgattcgtatggctaatcttattggcattaatgaattttatgttattcgtccgcttttacagaaaaaggtaaaagaactcggtcagtgccaatgtatttttgaaactctacgcgatttatatgtagatgcttttgatgatgtagattatgataagtatgtaggttattcaagttcagctaaacgatatattgataaaattatcaagtatcctgagctagattttatgatgaagtacttcagtgtagatgaagtttctgaagaatatacacgactcgctaatatggttagttcattacagggtgtatattttaatggtggaaaagataccattggtcatgacatctggacagtaactaatctttttgatgtattatcaaataatgcttcaaaaaacagtgataaaatggttgctgagtttaccaagaaattccgtattgtttccgacttcatcggatatcgcaactctttaagtgatgatgaagtttctcaaatcgctaaaactatgaaggcccttgcggcctaa

SEQ ID NO: 415 - DNA, 1818 bp, Artificial Sequence
  Synthetic
atgattaagaatgaaattaaaattctgagcgatattgaacacatcaaaaagcgtagtggcatgtatattggctcttctgctaatgaaatgcatgagcgctttctgtttggtaaatgggaaagtgttcagtatgtacctggtcttgttaagcttattgatgaaattatcgataactcagtagatgaaggtattcgtactaagtttaaattagcaaataaaattaatgttactattaaaaacaatcaagtaacagttgaagataacggtcgtggtattccacaagcgatggttaaaacacctactggtgaagaaattcctggtccagttgctgcatggactattccaaaagcaggtggtaactttggtgatgataaagaacgcgtcaccggtggtatgaatggtgttggttctagtttgacaaacattttttctgtgatgtttgtcggtgaaactggcgatggtcaaaataatattgtagttcgttgttcaaatggcatggaaaataaatcatgggaagatattcctggaaaatggaaaggaactcgtgttactttcattcctgattttatgtcatttgaaactaatgagctgtcccaagtttatcttgacattacacttgatcgtctccagacgcttgctgtagtttatcctgatattcaatttacctttaatggtaaaaaggttcagggcaattttaagaaatatgcacgacagtatgatgaacatgctattgttcaagaacaagaaaattgttctattgcggttggtcgttcaccggatggttttcgtcagttgacgtacgtcaataacattcatactaagaatggtggccatcatattgactgtgttatggatgatatttgtgaagaccttattccacaaatcaaacgtaaattcaaaattgatgtaactaaagcacgtgttaaagaatgtttgactatcgttatgtttgttcgcgatatgaaaaacatgcgatttgactctcaaactaaagaacgacttacttctccttttggtgaaattcgtagtcatattcaacttgatgctaaaaagatttcacgcgctattctaaataatgaagcaattttaatgccaattattgaagcagcattagctcgtaaattggcggcggaaaaagcagcagagacaaaggcagctaaaaaagcttctaaagctaaggttcataaacatatcaaagcgaatctttgtggtaaagatgctgatactactcttttcttgactgagggtgattctgctatcggatatcttattgatgttcgtgataaagaacttcatggtggttatccattgcgtggtaaagttcttaatagctggggtatgtcatatgccgatatgcttaaaaacaaagaactatttgatatttgcgcaatcactggtctagttcttggtgaaaaagctgaaaacttgaattatcataatattgctattatgactgatgctgaccatgatggtctaggaagcatttatccttctctgctcggattttttagtaattggccagaattgtttgagcaaggacgaattcgctttgtcaaaactcctgtaatcatcgctcaggtcggtaaaaaacaagaatggttttatacagtcgctgaatatgagagtgccaaagatgctctacctaaacatagcatccgttatattaaaggacttggctctttggaaaaatctgaatatcgtgaaatgattcaaaatccagtatatgatgttgttaaacttcctgagaactggaaagagctttttgaaatgctcatgggagataatgctgaccttcgtaaagaatggatgagccagtag

SEQ ID NO: 416 - DNA, 261 bp, Artificial Sequence
  Synthetic
atgaaatatattaatcgttctatcgcagcattagtattagcagtgtctttagtaggatgtactgatgctgataatgcaacaaaagttttgtcttcaagtggttttactaatattgaaatcactggatataattggtttggttgctctgaaaatgatttccagcatactggatttcgtgctattggacctaccgggcagaaagtagaaggaacagtatgttctggtttattcttcaaagattcgactatccgttttaaataa

SEQ ID NO: 417 - DNA, 1423 bp, Artificial Sequence
  Synthetic
atggaaaacttaattatcatcgagcaatctttcaacgattatggtatggcttatggttatcgtgcgataatggaagattctcgtggatgtgttatcgatattgctgaatgtaaagatttactgcagcttttgaagattgttcgcaaaaattgggattgtgaaaatattaaagttcgaattgttacagaagaagaaactgtttttcatgatgtaaaattcgctaaaggtgctgctactcttctgaaacgtatcgctccactgttcaattaatgaggaaattataatgaaacgtaaaattgttcagaactgcactaatgatgaatttgaagatgtattattcgatccagatttggtagtagttcaaaaggaacacaccatcaagtttactcacttgacttcggtttatgtgtatgagaaagtcggtgataaacaaccaatttacggtgtatttcgtgaaattactgaagatggcacaacttactggaaggaaatttattaatggctattaaatttgaagttaataaatggtatcaatttaaaaataaacaagctcaagaaaattttattaaagaccatactgataacggaatctatgcacgccgtttaggtatgcatccttttaaaattttagatgttgattatctttggcgtcctactaaaattgtgacatctactggcacagttggatatgcaacacacggtgatatccttgacgaaaactttatctggctttctactaacgaagctgggttctttgatgaagtggaaaatccatatcaggcagttgaagagcaagagcaggaagagaaagagcaagaacaaatagaagatttcacagaattcccagtaatgaaagttactattgaaaataatgaacaggcatggtccttgtatcaaatgctgaaagcacactttaaggaataattatgccaatgtatgattataaatgccaatccgaagattgcgggcatgaatatgaaaaaattaaaaagatttctgaacgagaaaatgatgtttgccctaaatgtcatcgtttgtctactcgtcggccttctgctcctaagcatgtgaatggtggtttttacgacttacttaaagggtaattatgtttaaaatcggtaagaaatattgcattcgtgaaggtgaagaacagaaatatctactttctgctagtaataggaatagttctattaatgctgtaatattgactagtgaatttatcgttgaagatatgaaaggtcataatgttacaatgattagtacagcatctggaaatgatggaaaaattcttcatagttgtcagagtaatgttctaatttatgatgaagaatttgacttcttcaaagaagtttccgaagattttgattttgaatgtactattactatgaaatctggtgaccctctttcttttacagttagatga

SEQ ID NO: 418 - DNA, 3570 bp, Artificial Sequence
  Synthetic
atgaagctgcataatatgtctaataatcaaattcgtaaaattaaacgtcgtttagagcatactcaggcatctgctaaaagacgttctaaagattttaacttagacttcaattacattaagaacattttagaccaaaaagtttgcgcttactcgggagaaccttttgataatcgtattgaaggagagaaattatcattagaacgttttgataataacgttggatacattaaagggaatgttattgcagtaaagaaaaagtataatacatttcgttctgattatactttagaggagttaattgaaaaacgtgatttgtttgctttgcgaattggtcgttcatctgcgaaaaaagttcataaactaaatttagatgaaaagaaatgggctaaaatcaaaaagacttataatcaaattaaagctatacagaaaaaacgtgaaaaccgaattgaacacatttctcagctttctaaatcaaaacagacctctgacattaagctaagaattatagcacttaaagctcgtattgatggttctcgtatagcagaaggcgctgaagttgttaaattgaacgttcttcttaaaggctcggattggaaaactgtgaaaaagttgtcagaagcagaaatgcaatatgatatgtgtgataaaattattcaaggtgtagagcggtatcaaaacttgtcttttattgataaacttaaactgaaaagaggatatccgctaaattgttcaatttttaaacttatccgaggataatatggtttatgtatatgcgatagtttaccgagacaaagacggatttacggcgccagttccgcttgatgaacatcgtcctgctgtattttttgaatggaagattgctgataaagtatttaccactcttaaagagcagtatcaactagctttaggtaagggaattccaagattagttgagactccacgcaagttttggtttaataaaatagaagttaaacatgttaagcctgatgtagacacacaaagattatatcggcgaattttagatactgggcgtattgttagtataccaattgcagggaatttacgatgacatttgatgatttgaccgaaggtcaaaaaaatgcctttaacattgttatgaaggctattaaagaaaagaaacatcatgtaactattaatggacctgctggtaccggtaagactactcttactaagttcatcattgaagctttaatatctacgggtgaaactggtattattttagcagctcctactcatgcagctaaaaagattctttcaaaactatcatggaaagaagcgagtactattcatagtattcttaaaattaacccagtaacatacgaagaaaacgttctttttgaacaaaaagaagtaccagatttagctaaatgcagggtattaatctgcgatgaagtgtcaatgtatgatagaaagctatttaaaattctgctttcaactatcccgccgtggtgtactataattggaataggcgataataagcaaattagacctgttgacccaggagaaaatactgcttatatcagtccattctttacacacaaagatttttatcagtgtgaactcactgaagttaaacgcagtaatgctcctattattgatgtagctactgacgttcgtaacggtaagtggatttatgataaagttgttgacgggcatggagtacgtggatttactggtgataccgctttacgcgattttatggtaaattatttttcaatcgtcaaatctttagatgatttgtttgaaaatcgcgtaatggcatttacgaataaatctgttgataagttaaatagcattattcgtaaaaagatttttgaaactgataaagattttattgttggtgaaattattgtaatgcaggaaccattaattaaaacatataaaattgatggaaagcctgtgtcagaaattatttttaataacggacaattagttcgtattatagaagcagagtatacatcaacgtttgttaaagctcgtggtgttcctggagaatacttaattcgtcattgggatttaacagtagaaacttacggcgatgatgaatattatcgtgaaaagattaaaataatttcatctgatgaagaactatataagtttaacctatttttaggtaaaacagcagaaacttataaaaattggaacaaaggtggaaaagctccatggagtgatttttgggatgctaaatcacagttcagtaaagtgaaagcacttcctgcatcaacattccataaagcgcaaggtatgtctgtagaccgtgctttcatttatacaccttgtattcattatgcagatgctgaattggctcaacaacttctttatgttggtgttacccgtggtcgttatgatgtattttatgtatgattaaatttgaggaagctattcgtggaaataactaaagatcagttttatcttcttcaagataaagtaagcgaaatttatgaaattgctcatggtaaaaatcgtgaaactgtaaaaattgaatctagtaagttgatgcttcaattagaagaaattgaacgagatttaattgcgttagaattcttttgtggcgaagtgaaaactgttacaattaatgattatgttttaggcgaaattagctatctttatgaggcgattattaatgattgaattaagttggtgccagtttaaatctcttatgacaaatgttaaagctgtcattgaagaaaatcagggtcctgaaaatattactattcgcgaaaaagctttaaagatagtatacagtcttgaagaaatacaaaaagatattgaatctatggcaaaatttattgatgagcctattaataaagtttatattcaagactatactgtaggtcaaattcgcgatttagcgaggaaagtttaatgtttgattttattatagattttgaaacaatgggaagtggtgaaaaagcagctgttattgatttggctgtaattgcttttgaccctaatccagaagtcgttgaaacattcgatgaattagtttcacgtggcattaaaatcaaatttgatttaaaaagccaaaaaggacatcgtctttttactaaaagcactatcgaatggtggaaaaatcaatctcctgaagctcgaaaaaatattgcaccatcagatgaagatgtaagcactatcgatggtattgcaaaatttaatgattacatcaatgcacataatatcgatccttggaaatctcaaggctggtgtcgtggaatgtcatttgattttccaattttagtcgatctcattcgtgatattcaacgccttaatggtgtatctgagaatgagcttgacacatttaagttagaaccatgtaaattctggaatcagcgtgatattcgtaccagaattgaagcacttctgcttgttcgtgatatgaccacgtgtcctcttccaaaaggaactttagatggattcgttgcgcatgattctattcatgactgtgcgaaagacatcctgatgatgaagtatgctttgcgatatgctatgggtcttgaagatgctccatcagaggaagaatgcgatcctctatctcttccaacaaaacgataa

SEQ ID NO: 419 - DNA, 1339 bp, Artificial Sequence
  Synthetic
atgattaataaaattgtgcatgaaatggctttaaacggagattcatataaaatatctgccgtagttgaaaatttcatacttaataaagtaaaagaatatttcactgattgttcagttagttatcaagaaaaaatggttttaattgatgatactgaaaaatcaaataatttgttttgctctaattttataactaaaaagcgtactagaagatttgatattgttatttctcgcaacggtaaaaagcatataattgaaattaaacaccaagttggtggaggtacagctattgattcggttggaatatatttagaagataaagagaaattaaaagaatacacaaaaactgaaaaccctgtgtcattgatgatattagattttttgccatgcggatattatccacgtaataaatggacaaaaagagaatcatttactgataatccaaccatccaagcaaggtttaatgaatatgctaaatcacaaaacgtgttagtattattatcaaatacatatgatgaagaattgtataattcatttttgctgcaataaatgagagaatataatgctaggagctatcgcgtatacgggtaataaacaatcattattacctgaacttaagcctcactttccgaaatatgacagattcgtggatttattttgtggaggtttatcagtgtctttgaacgtcaatggtcctgtattggccaatgatattcaagaaccaattattgaaatgtataagcgtcttattaatgtatcatgggatgacgttttaaaagtaataaagcaatacaaactatcaaaaacatcaaaagaagagtttttgaaattacgtgaagattataataaaactagagatcctcttttactttatgttcttcattttcacgggtttagtaatatgattcgtataaacgataaaggaaattttactactccgtttggaaaaagaactataaacaaaaatagtgaaaaacgctttaatcactttaaacaaaattgtgataaaataatctttagttcattgcattttaaagatgtcaaaattctagacggcgattttgtatatgtggaccctccgtatcttataacagttgctgattataataaattttggtcagaagaagaagaaaaagaccttttaaatcttttagattctttaaatgacagaggaataaaatttggactgtcgaatgttttagagcatcacggaaaggaaaacactcttcttaaagaatggtctaaaaaatataatgttaagcatcttaataaaaaatacgtctttaacatatatcattccaaagaaaagaatggaactgatgaagtatatatttttaattaa

SEQ ID NO: 420 - DNA, 201 bp, Artificial Sequence
  Synthetic
atggtacaaaaattaatggcacttgttaatgccatcaaaggtaataaaaagcgtatagcttttactatttctgctatggtaggaattttactctggaactttattttatcacctgttgcaattgcacatggtattaatattccaatagttactcttgatacattcgtagatttagcatttgctttagttgggttaatttaa

SEQ ID NO: 421 - DNA, 442 bp, Artificial Sequence
  Synthetic
atggaattggtaaaggtagtttttatggggtggtttaagaatgaaagcatgtttactaaagaaaccacaatgatgaaagatgacgttcaatgggctactactcaatatgctgaagttaataaagcattagttaaagctttcattgatgataagaaagtgtgtgaagtggattgccgaggataatatgcatattgttttatttaaacctactccgtataacgtcaggaaaaatacgcaattcaaagcacttattgcagatacgtgggaattggtgttagatattccagcagaagaaagtcctccatttggtcgagtggaatttattaagtttgctgttcgccctacgaagcggcagattcgccaatgcaaaagatactttcgtaagatcgttaagctagagaaacagtttgtaacatgtgattacgcaaaagttttaaaataa

SEQ ID NO: 422 - DNA, 2956 bp, Artificial Sequence
  Synthetic
atgtctattgcagatttaaaatcccgtttgattaaagcttccacttctaaaatgactgctgagctgactacatctaaattctttaatgaaaaggatgtaatccgtacaaaaatcccaatgcttaatattgctatttctggtgcgattgatggtggtatgcagtctggtttaactattttcgcagggccttctaaacactttaaatcaaatatgtctttgactatggttgcggcatatttgaacaaatatcctgacgcggtttgtctattctatgatagcgaatttggtattactccagcttatttgcgatccatgggagttgacccggaacgagtaattcatacgccaattcagtcagttgaacagctgaaaattgatatggtgaaccagcttgaagctattgagcgtggtgaaaaggttattgtattcatcgactcaatcggtaatatggcttctaagaaagaaacggaagatgccttgaatgaaaaatctgtggcagatatgactcgtgctaaatcactgaagtcattattccgtattgttactccttattttagcattaaaaatattccgtgtgttgcggttaaccatacaattgaaacaattgaaatgtttagtaaaaccgtgatgacaggtggtacaggcgtaatgtattcggctgatactgtattcattatcggtaaacgtcagattaaagatggttctgatcttcaggggtatcaatttgttctaaatgtagaaaaatctcgtaccgttaaagaaaaaagtaaattttttattgatgttaaatttgacggtggtatcgatccttattctggattgttagatatggctctagaattaggattcgtggtaaaacctaagaatggttggtatgctcgtgaatttcttgacgaagaaaccggcgagatgattcgcgaagaaaaatcttggcgtgcaaaagatactaactgcactacattctggggtcctttatttaagcatcaaccattccgagatgctattaaacgtgcttatcagttaggtgctattgatagtaatgaaattgttgaagctgaagttgatgaattgattaactcaaaggttgaaaaatttaaatctccagaaagtaaaagtaaatcagcagctgatttagaaactgacctcgaacagttaagtgatatggaagaatttaatgaataaagatgatttagatttagatctagaaattatcgatgaatccccctcttcggagggggaagaagaaagaaaagaacgtctttttaatgagtctcttaagataattaaatccgctatggaaaatgttatccaggagattgtcattaaactagaagatggttctacacatatagtgtatgtaacaaaactggattgggttgatggaaaggttgtaatggactttgctgttcttgaccaagaaagaaaagctgagttagctcctcatgtagaaaaatgtattacaatgcaattacaagatgcatttaataaaaggtcaaagaaaaaatttaaattcttttaaggagtaagtgtggtagaaattattctttctcatctcatatttgatcaagcttatttttcaaaagtttggccatatatggattcagaatattttgaaagtggtccagctaaaaatacattcaaattaattaaatctcatgttaatgagtaccatagcgttccatctattaatgcgttaaatgttgcattagaaaatagttcatttactgaaacagaatattctggtgtaaaaacacttatttcaaaactagctgattctccggaagaccacagctggttagtaaaagaaacagaaaaatatgttcagcaaagggcgatgtttaatgctacgtctaaaataatcgaaattcaaactaatgctgagcttcctccggaaaaacgaaataagaaaatgccggatgttggtgctattcctgacatcatgcgccaagcattatcaatttcatttgatagctacgttggtcatgattggatggatgactacgaagcacgttggctatcttatatgaataaagctcgtaaggttccatttaaactcagaattctaaacaaaattactaaaggcggagctgagactggaacactgaacgttttaatggctggcgttaacgtcggtaagtcattaggattgtgttcattggcagcagattatttacagctcggacataatgttctttacatttcaatggaaatggcagaagaagtctgtgctaaacgtattgatgctaatatgcttgatgtttctcttgatgacattgatgatgggcatatttcttacgctgagtataaaggaaaaatggaaaaatggcgtgagaaatctactctcggtcgtttaatcgttaaacagtatcctaccggtggagcagatgctaatacatttcgatcgcttttaaatgaattgaagctcaaaaagaattttgttccaacaatcattattgtcgactatctaggtatttgtaaatcttgccgcattagagtttattcagaaaatagttacacaactgttaaagctattgcagaggaattgcgtgctctggctgttgaaaccgaaactgttctttggactgcagcacaggttggtaaacaagcttgggactcttccgatgttaacatgagcgatattgcagaatctgccggtcttccagcaacagccgattttatgcttgcagtcattgaaaccgaggagctagcagctgctgaacaacaactcattaagcaaatcaaatcacgatatggtgataaaaacaaatggaataagtttttgatgggtgttcaaaaaggaaatcagaaatgggtagaaattgaacaagattctactccaactgaagtgaacgaagtagcaggttcacaacagattcaggctgagcagaatcgctatcaaagaaatgaatccactcgagctcagttagatgctttggcgaatgaattaaaattttag

SEQ ID NO: 423 - DNA, 2697 bp, Artificial Sequence
  Synthetic
atgaaagaattttatatctctatcgaaacagtcggaaataatattattgaacgttatattgatgaaaacggaaaggaacgtactcgtgaagtagaatatcttccgactatgtttaggcattgtaaggaagagtcaaaatacaaagacatctatggtaaaaactgtgctcctcaaaaatttccatcaatgaaagatgctcgagattggatgaagcgaatggaagacatcggtctcgaagctctcggtatgaacgattttaaactcgcttatatcagtgatacgtatggttcagaaattgtttatgaccgaaaatttgttcgtgtagctaactgtgacattgaggttactggtgataaatttcctgacccaatgaaagcagaatatgaaattgatgctatcactcattatgattcaattgacgaccgtttttatgttttcgaccttttgaattcaatgtacggttcagtatcaaaatgggatgcaaagttagctgctaagcttgactgtgaaggtggtgatgaagttcctcaagaaattcttgaccgagtaatttatatgccatttgataatgagcgtgatatgctcatggaatatattaatctctgggaacagaaacgacctgctatttttactggttggaatattgaggggtttgacgttccgtatatcatgaatcgcgttaaaatgattctgggtgaacgcagtatgaaacgtttctctccaatcggtcgggtaaaatctaaactaattcaaaatatgtacggtagcaaagaaatttattctattgatggcgtatctattcttgattatttagatttgtacaagaaattcgcttttactaatttgccgtcattctctttggaatcagttgctcaacatgaaaccaaaaaaggtaaattaccatacgacggtcctattaataaacttcgtgagactaatcatcaacgatacattagttataacatcattgacgtagaatcagttcaagcaattgataaaattcgtgggtttatcgatctagttttaagtatgtcttattatgctaaaatgcctttttctggtgtaatgagtcctattaaaacttgggatgctattatttttaactcattgaaaggtgaacacaaggttattcctcaacaaggttcgcacgttaaacagagttttccgggtgcatttgtatttgaacctaaaccaattgctcgtcgatacattatgagttttgacttgacgtctctgtatccgagcattattcgccaggttaacattagtcctgaaactattcgtggtcagtttaaagttcatccaattcatgaatatatcgcaggaacagctcctaaaccaagtgatgaatattcttgttctccgaatggatggatgtatgataagcatcaagaaggtatcattccaaaggaaatcgctaaagtatttttccagcgtaaagattggaaaaagaaaatgttcgctgaagaaatgaatgccgaagctattaaaaagattattatgaaaggcgcagggtcttgttcaactaaaccagaagttgaacgatatgttaagttcactgatgatttcttaaatgaactatcgaattatactgaatctgttcttaatagtctgattgaagaatgtgaaaaagcagctacacttgctaatacaaatcagctgaaccgtaaaattcttattaacagtctttatggtgctcttggtaatattcatttccgttactatgatttacgaaatgctactgctatcacaatttttggtcaagttggtattcagtggattgctcgtaaaattaatgaatatctgaataaagtatgcggaactaatgatgaagatttcatcgcagcaggtgatactgattcggtatatgtttgtgtagataaagttattgaaaaagttggtcttgaccgattcaaagagcagaacgatttggttgaattcatgaatcagtttggtaagaaaaagatggaacctatgattgatgttgcatatcgtgagttatgtgattatatgaataaccgcgagcatctgatgcatatggaccgtgaagctatttcttgccctccgcttggttcaaagggtgttggtggattttggaaagcgaaaaaacgttatgctctgaacgtttatgatatggaagataagcgatttgctgaaccgcatctaaaaatcatgggtatggaaactcagcagagttcaacaccaaaagcagtgcaagaagcactcgaagaaagtattcgtcgtattcttcaggaaggcgaagagtctgtccaagaatattacaagaacttcgagaaagaatatcgtcaacttgactataaagttattgctgaagtaaaaactgcgaacgatatagcgaaatatgatgataaaggttggccaggatttaaatgtccgttccatattcgtggtgtgctaacttatcgtcgagctgttagtggtctgggtgtagctccaattttggatggaaataaagtaatggttcttccattacgtgaaggaaatccgtttggtgataagtgcattgcttggccatcgggtacagaacttccaaaagaaattcgttctgatgtactatcttggattgactactcaactttgttccaaaaatcgtttgttaaaccgcttgcgggtatgtgtgaatcggcaggtatggactatgaggaaaaagcttcgttagacttcctgtttggctga

SEQ ID NO: 424 - DNA, 687 bp, Artificial Sequence
  Synthetic
atgaaactgtctaaagatactactgctctgcttaaaaatttcgctactattaactctggtattatgcttaaatccggtcaatttattatgactcgcgcagttaatggtacaacttatgcggaagcaaatatttctgacgttattgattttgatgtagcgatttacgatttgaacggttttctcggtattctgtctctagttaatgatgatgcagaaatttcccagtcagaagatggaaatattaaaattgctgatgctcgttcaacaattttttggccagcagccgatccgagtacagtagttgctcctaataaaccaattccattcccggtagcatctgttgttactgaaattaaagctgaagaccttcaacaactgttgcgtgtatctcgtggtctgcaaattgatacaattgctatcacggtaaaagaaggtaaaatcgtaattaacggttttaataaagtagaagattctgctctgacccgtgttaaatattctttgactcttggtgattatgatggtgaaaatacatttaatttcattatcaatatggcaaatatgaaaatgcaaccaggaaattataaacttctgctctgggcaaaaggtaaacaaggtgctgctaaatttgaaggtgaacacgcgaattatgtagtagctcttgaagctgattctacccacgatttttaa

SEQ ID NO: 425 - DNA, 588 bp, Artificial Sequence
  Synthetic
atggaatattcaactggacagcatctattaactattcctgaaataaaacgatatattctgagaaataatttttctaatgaagagcatatagttactgaatctatgcttaggaatgcatttaaagcagaatatacaaaaataatgtccaatagaaatgaagcttggactgttactgattattatgactaaaggtgtattatgactaaaattactgtgaattatactgttgatgtaaaagatattcagccaaaacacgtgcgttctgaatcaaatccacaaaaccaaaataaaattcgtcgagcatgggttttgtctctttctgataacgcaatggaagttattcagaacaaaattaaatctgcacctgctcgtcatgcgtattatgaagctatcgatcgtgaagtaagtaataaatggattgaactaatgcgcaaacatactacagaatccctaaacgccggtgctaaatttattatgacttcatgtggtgaacgccttgaagatgattattgcggtaatgcagatgaacgtctaattgttgctgctcaaattgttgcggaaacaattgcggctgattttaatcgttaa

SEQ ID NO: 426 - DNA, 1203 bp, Artificial Sequence
  Synthetic
atgaaagtatgtatttttatggctcgaggtcttgaaggttgcggtgtaactaaattttctcttgagcaacgtgattggtttattaaaaatggtcatgaagtaactttggtttatgctaaagataaatcatttactcgtaactgtgcgcatgattataaatcattttcaattccggttttattggcaaaagaatacgataaaacacttaagctggtaaatgattgtgatattctaattatcaattcagttcctgctacttcagttgaagaagacactattaataactataaaaaaattattgataacattaaaccttcggttcgtgttgtagtttatcaacatgaccattcttctctttctttgcgtcgaaatttgggattagaagaaactgttcgtcgagctgatgttatttttagccattctgataatggtgattttaataaagttctgatgaaagaatggtatccagaaactgtttctctgtttgatgatattgaagaagcgccgacagtatataactttcagcctcctatggatattgcgaaggttcggtcaacctactggaaagatgtttctgaaattaacatgaatatcaaccgttggattggtcgtacgactacatggaaaggtttttatcagatgtttgattttcacgaaaaacatcttaaacctgcaggactaagtactattatggaaggtctggaacgttctccagcgttcattcctattaaagaaaaaggaattccatacgagtattatcgtcttcatcaagtagaccaaattaaaattgctcctaatttaccaacgcaaattcttgaccgttatgtaaatagcgaaatgcttgaacgcatgagtaaatccggatttggttatcagttgagtaagttggacaaaaaatatctacaacgttctttagaatatactcatctcgagcttggtgcatgtggaacaattcctgttttctggaaatcaacgggtgataatttaaaattccgtgttgataatactcctttgacctcgcatgatagcggtatcatttggtttgatgaaaatgacatggaatcaacattcgagcgtattaaagaactgtcatctgaccgaactctttatgaccgcgaacgtgaaaaagcatatgaatttttgtatcagcatcaagattcaagcttctgctttaaagaacagtttgacattattacaaaataa

SEQ ID NO: 427 - DNA, 545 bp, Artificial Sequence
  Synthetic
atgactattcaaattaaaaacgccatcaattcttacgcatatgataaagtagtttctttgttagaaaaaggcgatattgtaactcctcaaattttggataaatgggaaaaagagcttcatcagacgatgaaacagaatgatcagaagattggacgcaatactgtccgtgaattgttggttcaatatatcttgtcagaatttgatgttaaagcttttggtgtagaatctaaagcttatcaaaagcatgaaatttccgataaaactattcgtcgcatgaaaaatcaacgcaagaaaaaatttgcagacctgaaaattactaaggtataattatgaacgaagctcttattaacgatttgcgtcttgctggatatgaagtaaatacaaatggcattggtttaattcaaattgaaggaaacggattcatccttgagtatgaatttagccaatggtggttatacgctaattacggtgaattaattgaatatgttgaccaatttgattcactagatgcagctcttggagcggctaagctgatgaattcttga

SEQ ID NO: 428 - DNA, 3394 bp, Artificial Sequence
  Synthetic
atgttattgactggcaaattatacaaagaagaaaaacaaaaattttataatgcacaaaacggtaaatgcttaatttgccaacgagaactaaatcctgatgttcaagctaatcacctcgaccatgaccatgaattaaatggaccaaaagcaggaaaggtgcgtggattgctttgtaatctctgcaatgccgcagaaggtcaaatgaagcacaaatttaatcgttctggcttaaagggacaaggggttgattatcttgaatggttagaaaatttacttacttacttaaaatccgattacacccaaaataatattcaccctaactttgttggagataaatcaaaggaattttctcgtttaggaaaagaggaaatgatggccgagatgcttcaaagaggatttgaatataatgaatctgacaccaaaacacagttaatagcttcattcaagaagcagcttagaaagagtttaaaatgacaattgaaaaagaaattgaaggattgattcataaaactaataaagaccttttaaacgagaatgctaataaagattctcgtgtttttccaactcaacgggaccttatggctggtattgtgtctaaacacattgccaaaaatatggtcccgtcttttattatgaaagcgcatgaaagcggaattattcatttccatgatattgattattcccctgctcttccatttactaattgctgtttagtagatttaaaaggaatgcttgaaaacggatttaagcttggtaatgcacagattgaaactcctaaatcaattggcgttgctactgcaattatggcacaaattactgcacaggttgcttctcaccaatacggcggaacgacttttgccaatgtagataaagtactttctccttatgttaaacgcacatatgcaaaacatattgaggatgcagaaaaatggcaaatcgctgatgcgttgaattatgctcaatctaaaacagaaaaagacgtatacgatgcattccaagcttatgaatatgaagtaaatactctctttagttcaaacggacaaacgccttttgtaacaattacatttggtacgggaactgactggactgaacgaatgattcagaaagcaattctgaaaaatcgcattaaaggtcttggccgtgatgggataactcctattttccctaagcttgttatgttcgttgaagaaggtgttaatctttataaagacgatccgaactatgatattaagcagcttgctttagagtgtgcaagcaaaaggatgtatcctgatattatttcagctaagaacaataaagctatcactggttcatctgttcctgtttctccaatgggttgccgtagtttcttgggcgtatggaaagattcgactggcaatgaaattcttgatggacgtaataatcttggtgttgtaacactgaatcttcctcgcatcgcgttagattcttatattggaacacagttcaatgaacagaaatttgttgaattgttcaatgaacgaatggatttatgttttgaagctttgatgtgtagaattagttccttaaaaggagttaaagctactgttgctcctattctttaccaagaaggtgcattcggggttcgtcttaaacctgatgacgacataattgagttatttaaaaacggtagaagttcagtgtctttaggatacattggtattcacgaattgaatattcttgtcggtcgtgatattggacgagaaattttaactaaaatgaatgctcatcttaaacagtggactgaaagaaccggatttgcttttagtttatattctactcctgctgaaaacctttgttatcgcttctgtaaactcgatacagaaaaatatggaagcgtaaaagatgttaccgataaaggctggtacactaacagtttccatgtttcagtagaagaaaatattactccgtttgaaaagatttctcgtgaagcgccatatcatttcattgcgacaggtggtcacatttcttatgttgaacttcctgatatgaaaaataacttaaagggtcttgaggccgtatgggattatgctgcacaacatttagattattttggtgttaacatgccggtagataaatgttttacatgtggaagtacccatgaaatgactcctactgaaaacggatttgtttgttctatttgtggagaaactgatcctaaaaagatgaacacaataagaagaacgtgtggttatttgggaaatccgaacgaacgtggatttaatctcggcaaaaataaagaaatcatgcatagggttaagcatcaatgaattatgatagattttatccttgcgattttgtgaatggccctggttgcagggtcgttcttttcgttacaggttgtttgcataaatgtgaagggtgttataataaatcaacatggaatgctagaaatggtattccattcactggtgaaacactagaacaattaattgaatgtttgaataatgattatatagaaggattgactataactggaggagaccctctctatccggataatcgagatgtcattcattgcattgttcaaacagtaaaaaatctttatcccaataaaagcatttggttgtggacaggatataagtttgaagatattaaacaactagaaatgcttaaatatgttgatgttattattgatgggaagtatgagaaaaatcttccgactaaaaagctgtggcgaggatcagataatcagcgactttggtcaaataccgatggggtgtggaaacatgattaaattgaattacattatggatactataaatgatatgatttttcattttggtccagaattttattcccaatatagtttagtgcttatcaatgcttggttaattaattaagggtaaaatatgtataaatttcgtaaaggtttagctgattttcttacaactgtaacattctttctgtttatggcagttggagctattttccttattccttttattgctatatttttcgtgattagtttaatttctccagaaaagggcttatcttccagtgagttcaatgagcgcctggataaaattactaacaagctgaatgctgctcttagtaaggaatagttgtgaaacaaaataagattgaagtctatggaattccagatgaagtaggtcgttgtcctggatgtcaatcagttacaaaacttctaaaggagctcaatgctccttttactttctataaagttcttacaaataatggtaagattgagtatgatcgtccactgattgtatctcttgctaaacgcgctggattcacatctcttaacattcgttatccagtcattttcattaatgattctagacaaaagaacattaaacacttcaaagaaactctcatttcacttggatatgatagagatatcatagaagattaa

SEQ ID NO: 429 - DNA, 2329 bp, Artificial Sequence
  Synthetic
atgaaacagttgataattaaaagattgaatttattgatatgttgtttatgtatagtaattgcatatggttattacgcaattaatgattatatgcattataaagattatgatgttactgtagttaatacccttacaggaactcaaggaaaggggtctagtttatcgtttattgccgtatatgaactcaaagacggttatagatttagcgaatatatttcgccagagatgtattcatcaatagaaaaaggcgataattactgtaagtttacgtcctttcgacgtaaaacagacattgtttgataatattgtttggttctttggaatggtattagttcaatctatatgtggtacttatatagtctgttcaatcttattccgcgtaattagtaaaattgagtgaggaaaatatgtcagtagtaattaataatgtcaatgcagtaattaaatctttagttaataaaaaaatgatgaatgaatggactgtacttcgtcgtggagagccagataaattttttcatagatttaacccaactttggatttgaatgttattgacagagatgttcatgctgaaattttagataaatttaaagttgatattggatttggattagaaaaacatttacagcgaacaaacgggtctggaatgagtttatctaatcgcatcatgaaagcccttaataaaattggagcattgtctcgtattaacgcgagtgaaatccttcgtaattataataaaggatatgacctttatggccgactaatgccgaaattatcattcgatcaaatgattgcggatttgtgggaaaatcaacgacgattattagcattaggcgctcgattagctaaaggtctagataaacaaatgatttttaaaactaataatacagaagaccttaaatgctttaaatttagtactcgtggagatgattattacgtcagagctcgctctacagattatgtcaatatggggcatcatctctgtttagcttttgaagttttaaaagaagcttgaacgttagaatattcatctggtgctaaatgcccgattggttcaaattgcattttaatttatcgcccgaatgaatccagttcaactaaattgcctacaaaacctgtaccagttcgtagtaacgaaaaacattctgaacaaattgattattttaataaacagattgaagagctgaatatttctattcaacaatatgacgatgaaatctttagactatctggattgagtagtaaagctaaatctgaacgtgaaaaattaattaaaattgttgatttacttaaatcttaaggaacaccatgaaaactcgttctcaaattgaagatatggttcgtaatgccagctatactcgtgatgctatgacatttttgtgtgaaaataatttagaccttaataaagttaattgttccattcacgcctttaaacatctgaacagcagtgaatgggtgcgtaattttaatgaagcagggtatattacacaaatgactgctcgtgagcagctcgttgatttctgtaaaactattgattataaaaatcctctatttgttcaaggcgttggtcagagtaaggttgatttatcaacaggattttttaatccaaatcattatcgtcttgaatggagatttattgctctattccgtaaacaattaaagcaaattttgtcgactgctagtcgattaaaaggttctgatattaacttaaagaatctgaaatttgatggttatactcttcagatggaagtaagaccattaaaagaaaataatagaactgcacgaattagctttaaacctaatacaaaaaattctctttcaatttgtgaatgccttaaatcacagttgatagaagcatttaagtatatggatgttgttgctagtgttcagtctaagatttcacagcatttcgaacgatttaaattaggcacaacaacgtatgaacttgatatggtcgttttatttaaatacgattttttgagaaaggacgaagttgtacaagagaaaaagcaggaagtgcaagataacttaaatttatctaattacttatcaaacgatcctaaattttggatgtatagttcaggtaataaagatgcatggaaattcaataaagtgaattttcttcctattgaaaatccgagtcttaaacctgttgaaaaatggcacgcggatgcgattgagaagtctatcaaggcagtagatgatgaactcgttaaagcaactaatgaagtgttagaagctgaaaagatgctagaaaaagcacaagaaaaagtcaaaaatctcacgaagcaacgttctaaactgaacaatgcactaaatgcactgaactag

SEQ ID NO: 430 - DNA, 528 bp, Artificial Sequence
  Synthetic
atgaacgctaaagatattttcaacctggtaaattacaacgatggtaaatttaaatctgaagcacaaagcaagttctttaatgacatctcaatcggaggtgaaatcacagttgatggaggacaaatttacaaatcccgttggaattggatcgttattatcgatgagattggtattgtagaaatttacaaaaatacgaataaaaatcgtacattacactggtctcgtgatactaacgaacagtacaaaaaggataaagcatctaagttatctcgtgtaactcaagaagatattgagttcatcaagaaagatattttgatgtatgataacttaattgctgaagagcaagctgttattgataaatttgacgagattaaagcttctcgtgaaattcctgattttatgaaagaatcagtaaatgaacgatacactctcatttcagagcgtattgaaacttacaaaaagcaaagagctgaacgccaaaatactcttcggaagtttgaagaacggttaaagacggtactcgcataa

SEQ ID NO: 431 - DNA, 303 bp, Artificial Sequence
  Synthetic
atgttatactcaaaggctcgtgaaatttacgaaactaagattaaagaagctgtatttcaattcgcaacaacgatgcgatggacaaatgattgggaatattcaaaaaatcataagaagcccctggtgacaagaaaggctcatatgttagtgttaatagaccgtgagcagattaaagcccgagaagccctccagaatcataaaaaggctgcctttgaatggtttatggataacactgctcctgagactaagaaagcagtgagcgcgtggttcagtggaaaaaattgtgaaagaagtttcttttag

SEQ ID NO: 432 - DNA, 2659 bp, Artificial Sequence
  Synthetic
atgaaagttttgtttgttgtgtatgtgatgattcaatataattacccaatgtttacttataatttggtgaataacattattgatatgattcagaggagtatgtaattatgagtgagtcgaagagaatcaatatgaaacgattagtattagaagatagtgtgctttttggtgaattagcgatcgaaaaagtaaataacatgtatcgtttgacgcaagaagatgatatgttatattacgcctagtgaaattgttcgtttaacccaaattgaatatgcttacactgataaaattgtaagcattaatgatgagcataaaattcatttttattcttcatgcccaggatttaatattaaaagcgagtcaatgtgcttatcaattaataattgggataattttataactaacattaaatatttttatgattctactaaaagaaaacataatttaaaatggtttaaaaatgtaatgctattattactaactcctgtaatcagaatgatgaaactattttaaatgtttcaaaatgctatgaagagggagatgtagtatctattcgtcaaattgacgattttcgatcgcatatcattacattaaacaaagacgaagctattgcactaaagacttatcttgattctgttattccaactatgatttcaaagtgaggaaatatgtttatttcaagtggaagtggtttaattcgtgttgaatttaaaaatgacatcttccttagtcaaggagatgatattattaaaatgagttatgacgaaatcaagaaaatttgtcatactcttgaaagccgtggaaaagtaaatgctgttttgacattggtgatttatgggtaacgctttatgaagtatccgaaggatttaacattgaagatgaaaataacattttagctattgataaaagaactgatttgcttgatgtattaaaagcctatgaacagtcaaacggtggaagaaaagctgtattgatttatcaaaaaccgcattcatgtggaactgcttcaatcatttcaaatattgaaggcgaagttgatacttatatgtgttttaaaagctggtggtgaccgtcatccggattttatttctattcgtcaaaacaatggagaaatttcattatcaaaatcagaagctgaagctatgattaagtatttaacaaccgttacgccttcaatgaaaggataattatgattattaatgaaaactcttggcactataaattattcaaactgtttaacgatgaatggcaacgacctaagacactatgcgcatatttttggtctattgcctcctacatttttcgtttctatttttgggtgtgctatactcgtagggctaacaattatttgtgcagaaagcctacaacgttggcttattttcggtagtttatggactcttcttccatcggcatttatacttgcgcttttggttgttttacttattatcggttcatttgttattcctgcacatttgcgtgaaaaatataaagattataaatggaaaaaggattatgctttacacgtagaaaatattgatagggcgtataaaggtttacctcctattcaacctaagaaatcgattatcgttgaatttttaaaagttcgtaaagctaaagtatgtcctgttattgaatataaggctgaatgatgaaaacagtaatgaaaagctattttggtagtcatctttatggaacttctaccccagaatctgatgtagattttaaagaaatttttgttcctcctgctcgcgatattcttatcggaaatgtcaaagagcacatgagcaaaaacactaacaacacatcatctaaaaacactaaagatgatattgaccatgaactatacagtcttaaatatttctttaaattagcagcagatggtgaaactgtagcgttagatatgcttcacactcaacctgaactagtggttaaatctgatttgcctgatgtgtggaagtttattcaagacaaccgttctcgtttttatacgactaacatgaaatcatatttaggatatgtccgtaagcaagcttctaaatacggtgtcaagggttctcgtttggctgcattacgtgatgtattgaaagtagttaatcaaatccccgagcaatgggttgattaccaagaagatggttctattaagcagcgtcgtactaaagttgaagatattaagcatcgtcttccagaaaacgaattctgtgaatgggtgttccataatcatgagaaaacaggcccacaaacgttctacactgtattgggtcgtaaatatcagacaacgctttctcttattgagcttaagcagtcactgaacaaattagatgctgaatatggtgaacgtgcccgtaaggccgaagccaacgaaggcattgactggaaagctctgagccatgcttgtcgtggtggacttcaactattggaaatttacaaaactggtgacttggtttatccacttcaagacgctccatttattctcgacgtgaagttgggtaaacatccatttaaaacggttcaagagtttttggaagatgtggtcgatcaagtagaagcagcatctactgaagcttctaagaacggtatgcagcaaaaagtagacatgggtttctgggatgacttccttgagaaggtttatcttgaaaaccaccgaagttattataaatga

SEQ ID NO: 433 - DNA, 902 bp, Artificial Sequence
  Synthetic
atgctacaattaactgaaaagcaacttcgcaatcttactgtgcttcaattagatgaaattcgtagggaagttggaaatatcatttcagctttgcgtcgagaagtatcacttaaccaatctccggcagactatactagattgcgaaattttgaaaaataccttgataaagttaaggccgtgcatcggcataaagtaaatacaggacaaaaatgataggaggcctttatggccttaaaagcaacggtactatttgccatgctaggattgtcatttgttttatctccatcaattgaagcgaatgtcgatcctcattttgataaatttatggaatctggtattaggcacgtttatacactttttgaaaataaaagcgtagaatcgtctgaacaattctatagttttatgagaacgacctataaaaatgacccgtgctcttctgattttgaatgtatagagcgaggcgcggagatggcacaatcatacgctagaattatgaaaattaaattggagactgaatgaaattcagcgacttttcacaaagtggaaaaccttcaaaggcagatgaatacttaggtttattaatggctgcacaagcttattttcattctgcacattttgaaactaaaagttatgctagacacaaagcatacgattttattttttccgagttgccagatttgattgataaattttgtgagcaatatttggggtattctggtagaaaatacacaccttcaattccagatgccagtaaacttcctaccgacacaattaaaatgattgatcgcatactagaccaatctaacagcatttataaagaaatgcctccagccatccaaagcacgatagatgatattactggaatgttttaccagagtaagtatcttctttccctcgaataa

SEQ ID NO: 434 - DNA, 2602 bp, Artificial Sequence
  Synthetic
atgaaaacctatcaagaatttattactgaagcagctattaattctcaaattattgctgaatcttttactgatcttttgaaatttaaaaaaggtcagaaaatcactgctgtattggatgatggtacagaagttgagatggatgtacagggatataattatgcagtagatggaaaactgtataataaatctcatgctaaatttgattcatttgacgactttgttaatacagttgaagatgaaaaaactcgtcgatccattgcaactggtgatgctaaggttcttatggcacatggtcatgaacgcattcgcgctaaacagaataaaatgggtgaagataatttcgcattagttggttatcaatctggtaaacaaacttatggctatcaacgtactgctaccatgtataacaaaaatggtaaaattgcctttgtgaatagtaaaggttctattcagtacgttaaatcgttcaaataacatgggaacaacctggacctcatgattctgtgagggattcccgccaacctgtaataatgtcgagcccaagcgcggtaatgggtaaatacagaaatggacaattcatgcgccatggaatggcccaaatttagagagaagaaatgagaacatttttaactggtccttatctatccctgatgaatgcttttacacaccattctgatgctagagtagaagaaatttgtaaaaacgaatatcccgccatttgaagacttacttaaacagtattgcacacttcgactagatggtggacgtcaatctggtaaatcaattgctgtgactaactttgctgctaattggttgtatgatggcggaacagttattgttctttctaatacttcagcttacgctaaaatttctgcaaataacatcaaaaaggaattttcgcgttattctaatgatgatatacgttttcgtttatttactgattctgtgcgcagttattggtaataaaggaagcaagttcagaggtttatcgctttcgcgaattttgtatataattgatgagcctgtcaaatctcctgatatggataagatttatagtgtccatattgacactgtacactgctgctgtaatattaaatgttgtattggtggtattactcgtccacagtttttcgtaatcggaatgcaatgatgacagacactcagcttttcgaatatctttatttttcgccaaaaactattaaaaataaattggtgaatcattttgaaattttggcaaaaaataacattttaagcgaattttatcctaagcaatacaaattacaaaaaggcgtattcaaaggatgcagagttttgtgtactgctcctaatgcacggctaatgaataaaattccatattttaccatggaatttattgatggaccttttaaaggattaattacccacagtttaatggcatatgattctgagccatttttaattaaagaacaatcttggataaatttattttctaattgaggtttatatgaaagcatatcaaattcttgaaggcacacataaaggtactatttattttgaagatggtattcaagcacgaattattgtctctaaaacctttaaagaggactcttttgtagacccagaaattttctatggtttgcatgcccgtgaaattgaaattgagccacaacctacagttaaaattgaaggtggtcaacacctgaacgttaacgttctgcgtcgtgaaactctggaagatgcagttaagcatccggaaaaatatccgcagctgaccatccgtgtatccggttatgcagttcgctttaactctctgactccggaacagcagcgcgacgttatcgctcgtacctttaccgagagtttgtaatggcaaagataattattgaaggttctaaagatgtgataaatgctttcgccgagtggtttagtaattcaggcgaacagcaatttaatgaagcctggaatatgggtgatattgatggaatttatcctacgacagaagtttctgttcagggatatggcattcatgaacctattcgtttagttgaatatgatttatgtactggtgaggaagtcaaatatgattgaagatattaagggataaaccacatactgaagagaaaatcggtaaagtgaatgctatcaaagacgctgaagttcgtttaggacttatctttgatgctttatatgatgaattctgggaagcactagataattgtgaagactgtgaattcgcgaagaattatgctgaaagcctcgatcagttaactattgctaaaacgaaactcaaagaagccagtatgtgggcttgtcgtgcagtgttccaaccagaggaaaaatactaatggatcaattaagcgcagggtttggttatgagtattatactgcacctcgtcgtgtatctgttgctcctaagaaaattcaaagtcttgatgacttccaggaagtagtccgtaacgctttccaggactatgcacggtatcttaaagaagattcgcaggactgtctcgaagaagatgaaattgcttactatacgcagcgtcttgaacagctcaaaaatctacatgaggttcgtgcagaagtttcaaagtctatgaataaattgattagatttaaagaataa

SEQ ID NO: 435 - DNA, 495 bp, Artificial Sequence
  Synthetic
atgaatatatttgaaatgttgcgtatagatgaaggtcttagacttaaaatctataaagacacagaaggctattacactattggcatcggtcatttgcttacaaaaagtccatcacttagtgttgctaaatctgaattagataaagctattggacgtaattgcaatggtgtaattaccaaagacgaggctgaaaaactctttaatcaggatgttgatgctgctgttcgcggaattctgagaaatgctaaattaaaaccggtttatgattctcttgatgcggttcgtcgttgtgcattgattaatatggtcttccaaatgggagaaaccggtgtggcaggatttactaactctttacgtatgcttcaacaaaaacgctgggatgaagcagcagttaacttagctaaaagtagatggtataatcaaacacctaatcgcgcaaaacgagtcattgcaacgtttagaactggcacttgtgacgcgtataaaaatctataa

SEQ ID NO: 436 - DNA, 594 bp, Artificial Sequence
  Synthetic
atgaacacactgaagaaaattgttgagtttattcgcactaaacttggttctgctatggctaaaaatctatctgttgaagaacagtatactgccgcagcagcaaaactgcttgataaaattaaagacctaaaaactgcttctgttaaatctattaatgaagaaaaacgtattcgtgaacttattgttgaaaagaataaacaggctgaatcaaaagagcgtgaaattcgcaagcttctttccgaaggtcaagatgtaacaatgcatgctaaactcggtttgctatatcgtcgaacagctgaacagctgactactaaagctgatggttatgctgaaatgcgaattgaaatcgctaagaaagtagttgagttagatgatgctcgccaagaacttgcagttaaattggaatatatccgtgaaactcgtgcagcaaatgcccttggaattagtactgctgatgatgtagttgaaattgcagcactgactaaggttgatattgaagatactcttgctcgagttgaaacctttaatggcaatatttctggggttgaaactacctctgccgatgttcaggaatatattaattctctgaaataa

SEQ ID NO: 437 - DNA, 177 bp, Artificial Sequence
  Synthetic
atgactactttaattatttggttcgacgaaaatgaagaaacatattgcgtgaacattggcgaaagcccaatgccagaatttgaatcttcagataaaaactcggttgtatcttgggctgaaggttataaagcagcaaaaggcgatgttgaaatagtttacaaactatccggagtataa

SEQ ID NO: 438 - DNA, 264 bp, Artificial Sequence
  Synthetic
atggataattacggtgaactgttcaacttctttatgaaatgtgtttcagaagatttcggtcgtacagtgaatgatattaaagttatcggtcctgaccatccgatgtttgaaacttacgcagtaatgggtaatgaagatggtcagtggtatactgtaaaggtcgtgattaacatgttcactgctgaaggttatgttaaactgtcttctaaagtttaccatgataacgacgaaatcgcagaagaatatttcaataatatgaaataa

SEQ ID NO: 439 - DNA, 351 bp, Artificial Sequence
  Synthetic
atgaaaggtaatgtttatttagtcgttcatgatttaacattctattttaatcataatgacactgttatttctgaacgtgtaattaatttgctttatcagcatgcagactatgtttatgtcgaaaacgaatttaggcattggcaatttctcaaaaatcgttcatttggtttagatggttacgaatactttgaacgtaaagaccttttagataaaattccattatctacacaataccaaaatcacaagtctttacataaatgccggctaattcgaaatgctgaatccgcgtatgaagcaattgatttatggcgtaaacgccgtgaacagattgatgctttaaaagaatattaa

SEQ ID NO: 440 - DNA, 402 bp, Artificial Sequence
  Synthetic
atgaatggctattggtggaaatcaacgggaaaatatgataagcgtggaagaaagggtcatgaatactgcatgtgccgtttcggtgataaaggaccatattcattaaataacatatattgcgcaactaataatcaaaatacaaaagatgcgagactaaatgatagatttcctccaaaatctaaaaattttaattttaatggtcgaaaacactcggcacagtccttagaaaaaatttctaaaaataatgcaagtaccttaagcaaagatgagataactagacgattaaaaatattagaaaattttaatatggatgaacgaggttttattaaaaattatgcaaacgctataaatgttagccatactcaagctagaaagtttttaaataaatattacataaaataa

SEQ ID NO: 441 - DNA, 991 bp, Artificial Sequence
  Synthetic
atgaaacgttgtgaattaattcgaaatgttgctattgcaatttctgcttccgcttttagtttttcaatgtttgttggatttatatgcggattattgactacagcagaaaatgtgttttcacttgtagtagcatttttaattggtttaatcgctatcgttatggataaaatttctaaaggttaataatgattctttatgcgaaagtatcgtccgttgaaaatggatataaatatgatcaagatgcggctaaagccttgattgatgattatggcattttaacatgttttgaagttgaaaaggtttacattgaccgttcatcttctcaagttaaattagtgaaggaagaccgtaaatttaatacagtaaattttgatttctttattgaaacagaaaaaggtcctcttgaatatgatattttcaagaatcctttgggtcttgaatgtattaaatatacttacattaatatggtgaacaaatgtatattcgtttaggcagcacaattcctaagggttacgtaattgatgtcactacctgggaaaatgatggtgataactataaaaccaaaacactgtttggcgtagaagagcatgagctccaacaatttaaatatcttttgaagaagtttaagagtcgtcattctagcactaaagctgaccgttattgtggtaatgggttgttcagcgagcaagagctttttatatatgaatatttggttgaaggactgttctcagaccaactttatccagaattcattaaaaaggtctttgatatagaagttgaccttggtaataaatccgaagaagatgaagaacgtgtatttgacttattctttgtgaatggtaataagatatttgaaggcctcattgatattcttggtcatgcttctgaatactatgaatatgatttcttgcgtgtagttgaacatgtagaatttgcttatatcgaagaagaaattgttttgccgactgttaaaatggttgatttgctttaa

SEQ ID NO: 442 - DNA, 309 bp, Artificial Sequence
  Synthetic
atgaaaacatttaaagaatttatcaatgaagcggctgcgccaaagacattcgttattaatactcagacgagtcttgacgatgagtatgcagaggcaattctgaagtcacttgctaagaacggcgttgaagtaatcgcctcggactttaagaaaggggcttccgagatgtttatttctataactaaaggatctaaagctaagatcaaatcatcattcggagttgctcgtaccgatcaaatcgacaatcatgactttaaacaaactggtgctaaacggcagaatacaattgcatcacgcggaataaaatag

SEQ ID NO: 443 - DNA, 255 bp, Artificial Sequence
  Synthetic
atgaaaactttcaaagagtttgctacaaaaactactattactgaatcttcccatggtatggaagtaaaacttggaatggctttagctgaagctgagcgtcttttctctcgtattaaagaacttgctgctgttgatccttcatcttttaaaggagaccaaactaaagttaaagcgcttttagcattatgctctgatgcaggcgaaatcgctaagaacggttctaagatgaagaaacgattagaagatttaaaataa

SEQ ID NO: 444 - DNA, 1423 bp, Artificial Sequence
  Synthetic
atgaaactaatctttttaagtggtgtaaagcgtagtggaaaagatactactgctgattttatcatgagcaattattctgcagttaaataccaacttgctggtcctattaaggatgcattggcttatgcatggggagtatttgcagcaaacactgactatccttgcttaactcgtaaagagtttgaaggaattgactatgatcgtgagactaatttaaatctgactaaattagaagtaatcacgattatggaacaagcattttgctatcttaatggtaaaagcccaattaaaggtgtgtttgtttttgatgacgaaggaaaagaatcagttaatttcgtagcatttaacaagattactgacgttataaataatattgaagatcaatggtcagtccgtcgtctgatgcaagccctaggtacggatttgattgttaataacttcgaccgcatgtactgggtaaaattatttgctttagattatcttgataaatttaactcaggttatgattattatatcgttcctgatacccgtcaagatcatgaaatggatgcggctagggcgatgggtgctacagtaattcatgtagttcgtcctggtcaaaaatccaatgatacacatattacagaagctggattgccaattcgtgatggcgatttagtaattacaaacgatggttctattgaagaacttttttctaaaattaaaaatacactaaaggtactataatgtctgaacaaactattgaacaaaaactgtctgctgaaatcgtaactctgaaatctcgcattcttgatacacaggaccaagcggctcgtctgatggaagaatccaaaattctgcaaggaactttggctgaaattgctcgtgcagtaggtatcactggcgataccatcaaagttgaagaaatcgttgaagctgtcaagaatcttactgctgaatctgcagatgaagcaaaagatgaagaataatggaatttaaagacttttcaacgggtctttatgtagcagctaagttttcagaattaacacttgatgcgctggaagaactccagcgctctttacgtgttcctaatccagttcctagagaaaaaattcattcgactatatgttattcaagagtaaatgttccatatgttccatcgagtggaagttttgaagtagcttcttctggacatttagaagtatggaaaacacaagatggatcgactcttgtacttgtgctagattctgaatatctgcgctgtcgacacatgtatgcgcgggcattaggtgctacacatgattttgatgattacacaccgcatataacattgtcttataatgttgggcccctatcatttagcggtgatgtacaaattccggtcgtattagatcgtgaatacaaagagcctcttaaactcgattgggcagatgatttaaaataa

SEQ ID NO: 445 - DNA, 1277 bp, Artificial Sequence
  Synthetic
atggcatattctggaaaatgggttcctaaaaatatatcaaagtatagaggtgaccctaaaaaaattacgtatagatcaaattgggaaaaattcttttttgaatggttagataaaaatccagaaattattgcatggggtagtgaaacagcagtaattccttatttttgtaatgcagaagggaaaaaacgtagatacttcatggatatttggatgaaagattcttctgggcaagaattttttattgaaataaaacctaaaaaagaaacacaaccaccggttaaaccagcacatctaacaaccgcagcgaagaaaagatttatgaatgaaatttatacatattctgttaataccgacaaatggaaagcagcacaatctttagctgaaaagcgtggaataaaatttagaattctaacagaagatggattacgagctcttggctttaagggggcataatggctatttttcaaataattaatgaaagcactccccaagttccaaaggttaagcaatcattaaacgaaaagaaatggattcagataggtcttgaatacaaaaaggccaaagcaaaaggaatgacaggaaagcaatttgctgaagaaagaggaatcaaatactctacgtttacttcagcaatgtcaaaatatgcttcaggaattaaaacggctgaaaagattcaaaaacttgaatcaaaaccaatgaataaactcaataagcaagaaagacaactgcttatgataaattcattcagacaaacattgcgtgataaaattcgtaatgaaggtgcagcaattaataataaaaccagaaagtggtttgccgaaactattaagcaagtaaaaggacataaagttgttcgcccgcagccgggacgaatatatgcttttgcttatgatgctaaacacaaggaaactcttccttattgggataaatttcctttgataatttaccttggtttaggtaagcataatttaatgtacggattgaacttgcactatattccacctaaagctcgtcagcaatttctagaagagcttttaaagcaatatgcaaatacacctactattactaataaaacgaaattaaaaattgattggagtcaagtgaaaggatttagaggtgcagatcaaatgattaaggcgtatatacctggtaatattatgggtagccttgttgaaatcgccccgaaagactgggcgaacgttgtgttgatgccacttcagcagttcgtttcaaaaggaaaacgtttctctgcaaacaaagtctggtcaaatatctaa

SEQ ID NO: 446 - DNA, 8107 bp, Artificial Sequence
  Synthetic
atgttcattcaagaaccaaagaaattgattgataccggcgaaattggtaacgcttctactggtgatatcttattcgacggtggtaataaaattaatagtgattttaacgcaatttataatgcgtttggcgatcagcgtaaaatggcagtagcaaatggcactggagcagatggtcaaattatccatgctactggatattatcaaaaacactctattacagagtacgcaactccagtaaaagttggcactaggcatgatattgatacctctactgtaggtgttaaagttatcattgaaagaggcgaacttggcgactgcgttgaatttattaactctaatggatcaatatcagttactaatcctctaacaattcaagctattgattcaattaaaggtgtttcaggtaatttagtagtaactagcccatatagtaaagttactttacgctgtatttcatctgataattctacatcggtttggaattattctattgaaagtatgtttggacaaaaggaatcaccagctgaaggtacatggaatgtttctacatccggatcagttgatattccactatttcaacgcactgaatacaatatggctaaattgctagttacgtgccaatcagtagatggaagaaaaattaaaacagcagaaataaatattcttgtggatactgttaattcagaggtaatttcttctgaatatgctgtcatgcgagttgggaatgaaaccgaagaagatgaaatcgctaatattgcatttagtattaaagaaaactatgtaacggcgactataagttcttcaactgtcggtatgagagcagcagttaaagttatcgctacgcagaaaatcggggtggctcaataatgaaacaaaatattaatatcggtaatgttgtagatgatggtaccggtgactacctgcgtaaaggtggtataaaaataaatgaaaactttgatgagctttattatgaactcggtgatggtgatgttccatattcagccggtgcctggaaaacttataatgcttcatcaggacaaacattaacagcagaatggggaaaatcatacgctattaatacatcttctggaagagtgactataaatcttccaaagggtacagttaatgattacaacaaggtaattagagctagagacgtatttgctacatggaacgtcaacccagttacactagtagctgcttccggcgatacgattaaagggtctgcagtaccagttgaaattaatgttcaattcagcgatttagaactagtgtattgtgccccaggacgttgggaatatgtcaaaaataaacaaattgacaaaattaccagttcagacattagtaatgtagctcgtaaagaatttttagtcgaagtccaagggcaaacagactttttagatgttttcagtggaactagttataatgtaaataacatcagagtaaaacatcgtggtaacgaattatattatggcgatgtgtttagcgaaaacagcgattttggctctccaggcgaaaatgaaggagaactggttcctcttgatggatttaatattcgattaagacagccttgtaatattggtgacactgttcaaattgaaacatttatggatggtgtatcgcagtggagaagttcatatacaagacgtcaaattagattgttagattcaaaattaacgtcaaaaacttctctagaaggaagtatttacgttactgatttatcaacaatgaaatcaattccattttctgcttttggattaattccaggagaacctattaatcctaattctcttgaagttagttttaatggaattttacaagaattggctggaacagttggaatgccattatttcattgtgttggtgccgattcagacgatgaagtagaatgctctgttttaggtggaacttgggaacaatctcataccgattattcagttgaaactgatgaaaacggcataccagaaattttacatttcgatagagtatttgagcatggtgacattatcaatatcacctggtttaataatgatttgggtacattattaacaaaagatgagattattgatgaaactgataatctctatgtatcgcaaggaccgggagtagatatttccggtgatgtaaatttaacagactttgataaaattggttggccaaatgtagaagcagttcaatcttatcaacgcgaatttactgctgtttcaaatatctttgatacgatttatcctattggaactatatatgaaaacgctgttaatccaaataaccctgttacatatatgggattcggctcatggaaattatttgggcaaggaaaagttttagttggatggaatgaagatatttcggaccctaactttgctctaaataacaacgatttagattctggtggaaatccttcgcatactgcaggcggaacaggtggttctacttctgttacattggaaaatgctaatcttcctgcaaccgagacagatgaagaagttctaatagttgatgaaaatggatcagtcattgttggtggatgtcaatacgatccagatgaatccggtccaatttatactaaataccgtgaagctaaagcatctactaactctactcacactccgccaacatcaataactaacattcaaccatatattacagtttatcgttggataaggattgcataatgagtttacttaataacaaagcgggagttatttcccgcttagccgattttcttggttttagacctaaaactggcgacattgatgtaatgaatcgtcaatcagtcgggtcagtgacaatatctcaattagcgaaaggattttatgaaccaaacatagaatcagctattaatgacgttcataatttttctataaaagacgttggtacaattattactaataaaactggtgtttctcctgagggtgtttctcaaactgattattgggcattttctggaactgtaacagacgattctcttcctccgggttctcctgttacggtattagtatttggtcttccagtttcagcaacaactggaatgacggcaattgagtttgttgcaaaagttcgtgttgcccttcaagaagctattgcatcatttactgctatcaactcatataaagaccatccaacagatggtagtaaattagaagttacttatttagataatcaaaaacatgtattaagcacatattctacatatggaataactatttcgcaggaaattatttctgagtctaaacctggctatggtacatggaatttattaggcgcacaaactgtaactttagataatcagcagactcctacagtattttatcattttgagagaacagcatgagtaataatacatatcaacacgtttctaatgaatctcgttatgtaaaatttgatcctaccgatacgaattttccaccagagattactgatgttcaggctgctatagcagccatttctcctgctggcgtaaatggagttcctgatgcatcgtcaacaacaaagggaattttatttcttgccactgaacaggaagttatcgatggaactaataataccaaagcagttacaccagcaacgttggcaacaagattatcatatccaaacgcaactgaagctgtttacggattaacaagatattcaaccgatgatgaagccattgccggagttaataatgaatcttctataactccagctaaatttactgttgctcttaataatgtctttgaaactcgtgtttcaactgaatcatcaaatggggttattaaaatttcatctttaccgcaagcattggcaggtgcagatgatactactgcaatgactccattaaaaacacaacaattagctgttaaattgattgcgcaaattgctccttctaaaaatgctgctacagaatctgagcaaggtgtaattcagttagctacagtagcacaggctcgtcagggaactttaagagaaggatacgcaatttctccttatacgtttatgaattctactgctactgaagaatataaaggcgtaattaaattaggaacgcaatcagaagttaactcgaataatgcttctgttgcggttactggagcaactcttaatggtcgtggttctacgacgtcaatgagaggcgtagttaaattaactacaaccgccggttcacagagtggaggcgatgcttcatcagccttagcttggaatgctgacgttatccaccaaagaggcggtcaaactattaatggaacacttcgcattaataatacgcttacaatagcttcaggtggggcaaatattaccggaacagttaacatgactggcggttatattcaaggtaaacgcgtcgtaacacaaaatgaaattgatagaactattcctgtcggagctattatgatgtgggccgctgatagtcttcctagtgatgcttggcgtttttgccacggtggaactgtttcagcgtcagattgtccattatatgcttctagaattggaacaagatatggcggaagctcatcaaatcctggattgcctgacatgcgcggtctttttgttcgtggctctggccgtggctctcatttaacaaatccaaatgttaatggtaatgaccaatttggtaaacctagattaggtgtaggttgtactggtggatatgttggtgaagtacagaaacaacagatgtcttatcataaacatgctggtggatttggtgagtatgatgattctggggcattcggtaatactcgtagatcaaattttgttggtacacgtaaaggacttgactgggataaccgttcatacttcactaatgacgggtatgaaattgacccagcatcacaacgaaattccagatatacattaaatcgtcctgaattaattggaaatgaaacacgtccatggaacatttctttaaactacataattaaggtaaaagaatgacagatattgtactgaatgacttaccattcgttgacggccctcctgcagagggccagagccgcatttcctggattaaaaacggcgaagaaatattaggagctgacacgcagtatggaagcgaaggttcaatgaatagacctacagtttctgtactaagaaatgtcgaagttctcgataaaaacattggaatacttaaaacatctttagaaaccgcaaatagtgatattaaaacaattcagggcatcttagatgtatctggtgatattgaagctttggcccaaataggtatcaataaaaaggatatttctgacctcaaaacgctaaccagtgaacatacagaaatattaaatggacctaatagtacagttgacaacattcttgctgatattggtccatttaactctgaggccaactctgtatacagaacaatcagaaatgatttactgtggataaagcgtgaacttggacaatacgcaggtcaagatattaatggtcttcctgttgtaggaaatcctagtagtggaatgaagcatcgcattattaataatactgatgccattacttcacagggaatacgtttaagcgaattagaaacaaaatttattgaatctgatgtaggttctttgactattgaagttggtaatcttcgtgaagagcttggaccgaaaccaccatcattttcacaaaacgtttatagtcgtttaaatgaaattgacactaaacagacaacatttgaatctgacattagtgctattaagacctcaataggatatccaggaaataattcgattattactagtgttaatacaaacactgataatattgcatctattaatttagagctaaatcaaagtggaggtattaaacagcgtttaaccgttattgaaacttctattggttcagatgatattccttcgagtattaaaggccaaatcaaagataatacaactttaatcgaatctctaaatggaatcgtcggtgaaaacacttcatctggtttaagagcgaatgtttcatggttaaacaaaattgttggaactgattctagcggtggacaaccttctccttctgggtctcttttaaaccgagtttctacaattgaaacttctgtttcaggattgaataacgatgttcaaaacctacaagtagagattggtaataatagcgcaggaattaaagggcaagttgtagcgttaaatactttagtaaatggaactaatccaaacggttcaacagtcgaagaacgcggattaaccaattcaataaaagctaacgaaaccaacattgcatcagttacacaagaagtgaatacagctaaaggtaatatatcttctttacaaagcggtgttcaagctctccaagaagccggttatattcctgaagcgccaagagatgggcaagcttacgttcgtaaagacggcgaatgggtattgctttctacctttttatcaccagcataacatggggccgcaaggccccaaaggattttaaatgtcaggatataattctcagaatccaaaggaactcaaagatgtcattctaagacgtttaggggctccaattattaatgttgagttaacacccgatcaaatttacgattgtatccagcgtgccctagaattatacggtgaataccattttgatggactcaataaagggtttcatgtgttttacgtaggggatgacgaagaaaagtacaagaccggagtcttcgatttaagaggttctaacgtatttgcagtaactcgcattttacgcacaaatattgggtcaataacatctatggatggaaacgctacatatccgtggtttactgactttcttttgggaatggctggtattaatggcggaatgggaacgtcttgtaatagattttatggaccaaatgcctttggtgccgatttggggtattttactcaacttaccagttatatgggaatgatgcaggatatgctctctcctattccagacttttggtttaattcagcaaatgaacagctcaaagtcatgggaaacttccaaaaatatgatttaattatcgtagaaagctggactaaatcatacattgatacaaacaaaatggttggaaatacagtaggatatggaacagtcgttccacaagataactggtcattatctgaacgatataataacccagacaacaatttagtaggtcgtgttgttggtcaagacccaaatgttaagcaaggtgcttacaataatcgttgggtgaaagactatgcaacagctttagctaaagaattaaatggtcaaattttagcacgccaccagggaatgatgcttcctggcggtgttacaattgatggacaacgcttaatagaagaagctcgattagaaaaagaagcactgcgcgaagaattatacttacttgaccctccatttggaattttggtaggttaatatggctacttacgataaaaatctttttgctaaattggaaaaccgcacaggttattctcagaccaatgaaactgaaatactaaatccttatgtaaatttcaatcattataaaaacagccaaatattagctgatgtattagtagctgaaagcattcaaatgcgaggtgtagaatgctattatgttccaagagagtatgtttcccctgatttgatattcggcgaagacttgaaaaataaatttactaaagcttggaaatttgctgcatatttaaattcatttgaaggatatgaaggagctaaatcgttctttagtaattttggtatgcaagtacaggatgaagttactttgtccattaatccaaacttgtttaaacaccaagtaaatggaaaagaaccgaaagaaggcgatttgatatattttcctatggataacagcttatttgaaattaactgggttgaaccatatgatccattttatcaattaggccaaaacgctattcgtaaaattacggcaggtaaattcatttattctggagaagaaattaatccagttctacagaaaaatgaaggaattaacattccagaatttagtgaattagaattaaatcctgttcgcaatcttaacggtattcatgacattaatattgatcagtatgctgaagtagatcaaattaattctgaagctaaagaatatgttgaaccctatgttgttgtcaataacagaggcaaatctttcgaatctagcccatttgataatgatttcatggattaa

SEQ ID NO: 447 - DNA, 5149 bp, Artificial Sequence
  Synthetic
atgtttggttatttttataattcgtcttttagacgatatgctaccttgatgggcgatttgttttcaaatatccaaatcaaacgtcagttagaatctggtgataagtttatacgtgttcctattacatatgcatcaaaggaacactttatgatgaaattgaataaatggacatcaataaattcacaagaagatgtagctaaagttgaaaccattctacctcgtataaatttacatttagttgattttagctataatgctccatttaaaacaaacattttaaatcagaatttactgcaaaaaggtgcaacttctgtagtatcgcagtataatccatctcctattaaaatgatttatgaattgagtatctttactcgctacgaagatgatatgtttcaaatagttgaacagattcttccatattttcaacctcattttaatacaactatgtacgagcagtttggaaatgatattccatttaaaagggatatcaaaattgtactgatgtctgctgctatagacgaagctatagatggggataatttatctcgtcgtagaattgaatggtcattaacatttgaagtaaatggatggatgtatcctccagtagatgatgcagaaggattaattcgtactacttatacagattttcacgccaatacaagagatttgcctgatggcgaaggtgtttttgaatctgtcgatagcgaagttgttcctcgagatattaacccagaagactgggatggaacagtaaaacaaactttcactagtaatgtaaatagaccaacaccgccagaacctcctggcccaagaacatagaggttattatggaaggtcttgatataaacaaacttttagatatttctgacctccccggaattgacggggaggaaatcaaagtatatgaacctctgcaattagtagaagttaaaagcaatccacaaaaccgtactcctgacttagaagatgattatggagtagttcgtcgaaatatgcattttcaacaacaaatgctaatggacgcggccaagatttttcttgagacggcaaagaatgctgattctcctcgtcacatggaagtatttgcaactcttatggggcaaatgactacgacgaacagagaaatactgaagcttcataaagatatgaaagatattacatctgagcaggttggcaccaaaggcgctgttcctacaggtcaaatgaatattcagaatgcgacagtattcatgggttcaccaacagaattaatggacgaaattggtgatgcttacgaggctcaagaagctcgtgagaaggtgataaatggaacaaccaattaatgcattaaatgatttccatccgttaaatgaagctggaaaaattttaataaaacacccaagcttagcggaaagaaaagatgaagatggaattcattggataaaatctcagtgggatggaaaatggtatcctgaaaaattcagtgattaccttcgtctacacaaaatagtaaaaattccaaacaactctgataagcctgaattatttcaaacttataaagataagaataataaaagatctcggtatatgggtcttcctaacttgaaacgagctaatattaaaacacaatggactcgtgaaatggttgaggaatggaaaaaatgccgagacgatattgtttattttgcagaaacatactgtgctattactcatattgactatggtgtcataaaggttcaattacgtgactatcagcgtgatatgctcaaaataatgtcatctaaacgtatgactgtttgtaatctatcgcgtcagctcggtaaaacaacggtagtagctattttccttgcacactttgtatgttttaacaaggataaagctgtaggtattcttgcgcacaaaggctcaatgtctgcggaagttttagaccgtactaagcaagcaattgaactgcttcctgactttttacagccaggtatagttgaatggaataagggttcaattgaactagataatggttcttcaattggcgcttatgcttcctctcctgacgcagttcgtggtaactcgttcgcaatgatttacattgacgaatgtgcgtttattccaaacttccatgattcctggcttgctattcaaccagtaatttcatctggtcgtcgttcgaaaattattattactacgactcctaatggattaaatcatttttatgatatttggactgctgctgttgaaggtaaatctggatttgaaccatatactgctatttggaattcagttaaagaacgtctttataacgatgaagatatttttgacgatggatggcaatggagcatacaaaccattaatggttctactttagctcaatttcgtcaagaacacaccgcagcgtttgaagggacttctggtacattaatttcgggaatgaaattagctattatggatttcattgaagtaactccagatgatcatggttttcatcgatttaaaagccctgaaccagatagaaaatatattgcaactctagactgctcagaaggtcgtgggcaagattaccacgctttgcatattattgatgttaccgatgatgtgtgggaacaggttggtgttttgcactcaaacactatttctcatttaattctacctgacatcgttatgcgttatttagtagaatacaatgaatgcccagtttatattgaattaaatagtactggtgtgtcagttgcaaaatcgctttatatggatttagaatacgaaggtgttatctgtgattcatatactgatttaggaatgaaacaaactaaacgcacgaaagcagtaggatgttccacgctaaaagaccttattgaaaaagataagcttattattcatcaccgagcgactattcaagaatttagaacgtttagtgaaaaaggcgtgtcttgggcggctgaagaaggttatcacgacgatttagtaatgtctttagtaatttttggatggttatcaacacaatcaaaatttattgattatgcggataaagatgacacgcgattagcatctgaagtattttcaaaagagcttcaagatatgagcgacgactacgcgccagttatatttgtggattcggttcattctgctgagtatgttccagtatctcatggtatgtcaatggtataaatatattaaagcatattaaagaggattaaaaatgactttattatctccgggcattgagctcaaagaaactacggttcaaagcaccgtggttaataactctactggtacagcagctttggccggtaaattccagtggggtcctgcttttcagattaaacaggttacaaatgaagtagatttagttaatacttttggtcaaccaaccgctgaaactgctgactattttatgtctgcgatgaatttcttgcagtacggaaatgacttacgagtagttcgtgctgttgatagagataccgctaaaaactcatcaccaatcgctggtaatattgaatacacaatttctaccccaggtagtaactatgcggttggagataaaatcacagtcaaatatgtttcagatgatattgaaactgaaggtaaaattactgaagtagacgcagatggaaaaattaagaaaattaatattcctactgcaaaaattatcgctaaagcgaaagaagtcggtgaatatccaacactaggttctaactggactgcggaaatttcttcatcttcctctggtttagctgcagtaataactcttggaaaaattattactgattctggtattttattagctgaaattgaaaatgctgaagctgctatgacagcggttgactttcaagcaaatcttaaaaaatatggaattccaggagtagtagcgctttatccaggcgaattaggcgataaaattgaaattgaaatcgtatctaaagctgactatgcaaaaggagcttctgcattactcccaatttatccaggtggtggtactcgtgcatctactgccaaagcagtgtttggatatggaccgcaaactgattcacaatacgctattatagttcgtcgcaatgatgctattgttcaaagcgttgttctttcaactaagcgtggtgaaaaagatatttacgatagtaacatctatatcgatgactttttcgcaaaaggcggctcagaatatatttttgcaactgcacaaaactggccagaaggcttctctggaattttaactctgtctggtggattatcatcaaatgctgaagtaacagcaggagatttgatggaagcttgggacttctttgctgaccgtgaatccgttgatgttcaactgtttattgcgggttcttgtgccggtgaatctttagaaacagcatctactgtccaaaaacacgtcgtttcaattggggatgctcgccaagattgcttagtattgtgctctcctccgcgtgaaactgtagttggaattcctgtaactcgtgcagtagataatttagttaactggagaactgcggcaggttcatacactgataataactttaatatcagttcaacctacgcagcaattgatggtaactataagtatcagtatgacaaatataatgatgtgaatcgttgggttccattagcagctgatattgctggtttatgcgcaagaactgataacgtatctcagacttggatgtctccagctggttataatcgtggccagattcttaacgttattaaacttgctattgaaactcgccaggctcagcgcgaccgtttataccaagaagctatcaacccagtaactggtacaggtggcgatggttacgtattgtatggtgataaaacagctacttctgttccttctccatttgatcgtattaacgttcgtcgtctgtttaatatgttgaaaacgaatatcggacgtagttcaaaatatcgtttgttcgaattaaacaacgcgtttactcgttcatcattccgcacagaaactgcccagtacttgcagggaattaaagctctcggtggaatttatgaatatcgtgtagtttgcgatacaacaaataacactccgtcagtaattgatagaaatgagtttgttgcaacattctacatccaacctgcgcgcagtataaattatattactttgaatttcgtcgcaacggctactggtgcagatttcgatgagttaactggtcttgcaggttaa

SEQ ID NO: 448 - DNA, 492 bp, Artificial Sequence
  Synthetic
atgtttgtagatgatgtaacacgcgcgtttgaatcaggtgattttgcgcgacctaacttattccaagtagaaatttcttatcttggacaaaattttacgtttcaatgtaaagccactgctttaccagctggtattgtagaaaaaattccagtcggatttatgaaccgtaaaattaacgtagcaggcgatcgtacattcgatgactggactgttacagtaatgaacgatgaagctcatgatgctcgccagaagttcgttgattggcaaagcattgctgcggggcaaggaaacgaaattactggtggaaaacctgcagagtataaaaagagcgctatcgttcgtcaatatgctcgtgacgctaaaacagtaacaaaagaaattgaaattaaaggtctgtggcctactaacgtgggtgaacttcaattagattgggattcaaacaatgaaatccaaacatttgaagtaactcttgctctcgattattgggaataa

SEQ ID NO: 449 - DNA, 1284 bp, Artificial Sequence
  Synthetic
atggctaaaatcaacgaacttctgcgcgaatcaaccacaacgaatagcaactcaatcggtcgcccaaatctcgttgctttgactcgcgctaccactaaattaatatattctgacattgtagcaacgcaaagaactaatcaacctgttgctgctttttatggtatcaaataccttaacccagacaacgaatttacatttaaaactggtgctacttatgctggcgaagctggatatgtagaccgagaacaaatcacagaattaacagaagagtctaaattaactctcaataaaggcgatttattcaaatataataatatcgtttataaagtattagaagatacaccatttgctgatattgaagaaagcgacttagagctggctcttcagattgcaattgttcttttaaaggttcgtctattttctgacgcagcgtcaacaagcaaatttgaaagctctgatagtgaaattgcggatgctagattccagattaataaatggcaaaccgcggttaaatctcgtaaacttaaaactggcatcacagttgaattagcgcaagatttagaagcaaatggattcgatgctcctaatttcttggaagatttgcttgcaactgaaatggcagatgaaatcaataaagatattctgcaatctttgattacagtgtcaaaacgctataaagttacaggaattactgatagtggattcatcgatttgagttatgcgtctgcacctgaagctggtcgttcattataccgaatggtatgtgaaattgtttcgcatatccaaaaagaatcaacttatacagcaacgttctgtgttgcttctgctcgtgccgctgcgattcttgctgcatcaggttggttaaaacataaaccagaagatgacaaatatctttcacaaaatgcctacgggttattagctaatggtttaccgctttattgcgatactaacagcccattagattatgtaatcgttggtgtagtagaaaatatcggtgaaaaagaaattgttggatcaattttctatgctccgtatacagaaggtctcgacttagatgaccctgaacatgtaggcgcatttaaagttgttgttgatccagaaagcttacaaccgtctatcagtttattagttagatatgctttatcagcaaatccttataccgtagcaaaagatgaaaaagaagcaagagtaattgatggtggagacatggataaaatggcgggtcgttcagatttgtctgttttattaggtgttaaattaccaaaaattattattgatgaataa

SEQ ID NO: 450 - DNA, 1476 bp, Artificial Sequence
  Synthetic
atgagaactgaggttgtggtgtttactcttcatgagtctggaaagtcattcattgaaattgctcgtgaattaaacttacatgcaaaagaagtggctgtattatgggctcgagctatgactgctaagaataaatttgaaactcgagaaaaagttgtctatagaaaaagacatatcaataaaaaggtgaaaaatggaacagtatgaactttatgaaaatgaatcttttgctaatcaattacgcgaaaaagcattaaaaagtaaacagtttaagctagagtgttttattaaagatttttcggaacttgctaataaagcagctgaacaaggtaaaacatattttagttattatactgctcgcgataaattgattactgaagaaattggtgattggctgagaaaagaaggatttaattttaaagtcaatagtgatcagcgtgatggtgattggttagaaattacattttgaggattaattatgtttaaaaagtagcagtcttgaaaatcattacaactctaaatttattgaaaaactttacagcttgggattgactggcggcgaatgggtagctcgtgaaaagattcacggcacaaatttctcattgattattgagcgtgataaagtaacttgtgctaaacgtactggaccgattcttcctgctgaagatttctttgggtatgaaattattctaaagaattacgctgattccattaaagcagtacaagatattatggaaacctcagcggttgtatcttatcaagtctttggcgaattcgctggacctggcattcagaagaatgttgattatggcgataaagatttttatgtatttgacattattgtcactacagaaagtggtgatgtgacttatgttgatgattatatgatggaatcattctgtaatacatttaaatttaaaattgctccacttttaggtcgcggtaaatttgaagagcttattaaattgccaaatgatttagattctgtcgtccaagattataattttacagtagaccatgctggattagttgatgcaaataaatgcgtttggaatgccgaagcaaaaggcgaagtatttactgctgaaggatatgtattgaaaccttgttatccttcttggcttcataatggaaatcgtgtagcaattaaatgcaagaattccaaatttagtgaaaagaaaaagtctgataagcctattaaagctaaagttgaactatcagaagctgataacaaattggtgggaattttagcttgttacgttacactgaaccgtgtaaataacgttatttctaaaattggcgaaattggtccaaaggattttggaaaggtgatggggctaactgttcaagatattttggaagaaacttctcgtgaaggtattactctaactcaagcagataatccttctttgattaaaaaggaattagttaaaatggtaagatgtacttcgtccagcttggattgagttggtgagctaa

SEQ ID NO: 451 - DNA, 1807 bp, Artificial Sequence
  Synthetic
atgatagataaagattatattgcagagctgaaggctcttgatgataacaaagaagctaaagctaaattagctgaatatgctgaacagtttggtataaaggtcaaaaagaataaatcttttgataatatcgttgttgatattgaagaagccctccagaagctcgctagtgaacctatgccagagactgatgggttatctattaaagacttaattgatgctgctgatgccgcagagggattaaaatatgacgatgaagaagtcaatccagaagcagcacttctgattgattctccggttaaatctgacattaaaattgaagtagtagaaacggataaaattcctgaaaataccgatgttttgattgaagatactccttttgttgaagaaaagtttgaacaagctgtagctgagattattgaatctgaaaagccgtctgtatttactcttccggaaaactttagtccgaatcttcagctgattggaaaaaatccaggattctgcactgttccttggtggatttatcaatggattgctgaaactccggattggaaatctcacccaactagttttgaacatgcgtcagcacaccaaactttatttagcttaatttattacattaaccgcgacggatcagttttaattcgtgaaacacgcaattcttctttcgtaacattaaaataaggataacttatgacttttacagttgatataactcctaaaacaccgacaggggttattgatgaaaccaagcagtttactgctgcacccagtggtcaaactgaaggtggaactattacctatgcttggagcgtagataatgttccacaagatggagctgaagcaacttttagttatacctgccggtcaaaagactattaaagtagttgcaacaaatacaattccagaagctgaagctgaaacagcagaagctactacaactatcacagttcaaaataagacacaaacgaccaccttagctgtaactcctaatagccctgacgctggagtaatcggaaccccagttcaatttactgctgccttagcttctcaacctgatggagcatctgctacgtatcagtggtatgtagatgattcacaagttggtggagaaactaactctacatttagctatactccaactacaagtggagttaaaaaatcaagtgtgtagctcaagtaaccgcgacagattatgatgcactaagcgttacttctaatgaagtgtcattaacggttaataagaagacaatgaatccacaggttacattgactcctccttctattaacgttcaacaagatgcttcggctacatttactgctaatgttactgatgctccagaagaagcgcaaattacttattcatggaagaaagattcttctcctgtagaagggtcaactaatgtatataccgttgatacttcatctgttggaagtcaaactattgaagtgactgccgtcgttactgctactgattatgatagcaaaacagttaaaacaacaggtcaagttcaggtaactgataaagttgctccagaaccagaaggtgaattaccttatgttcatcctcttccacatcgtacttcagcttacatctggtgcggttggtgggttatggatgaaatccaaaaaatgactgaagaaggtaaagattggaaaactgaagatccagagtaaatactacctgcatcgttacactcttcagaagatgatgaaagactatccagaagttgatgtccaagaatcgcgtaatggatacatcattcataaaactgctttagaaactggtatcatctatacctatccataa

SEQ ID NO: 452 - DNA, 832 bp, Artificial Sequence
  Synthetic
atgagattagaagatcttcaagaagaattgaagaaagatgtgtttatagattcaactaaattacagtatgaagcagctaataatgtgatgttatacagtaaatggcttaataagcattcaagtattaaaaaggaaatgcttagaattgacgcacagaaaaaagttgctcttaaagctaaattagactactactcgggacgaggagatggtgatgaatttagtatggatcgttacgagaaatcagaaatgaagacagttctatcagcggataaggatgttttaaaggttgatacctcgttacagtattgggggattttattagatttctgtagcggagctcttgatgctatcaaatcacgcggatttgctattaagcatattcaagacatgcgggcatttgaggctggaaaataatgagatatagcattgatgatgcttttaattatgaagaagaatttgaaactgagattcaattcttaatgaaaaagcataatcttaagcgtcaggatattcgtatcctggccgatcacccgtgtggtgaagatgtcctttatattaaaggaaaatttgccggatatcttgatgaatatttttattctaaagatatgggcattgatatgcatatgagagttgtataaatagatataattcagaggagacaatcatgtcagataagatttgtgttgtctgtaaaactccaatcgattctgcattggttgttgaaacagacaaaggtcctgtacatcctgggccttgctataattacattaaagaactaccagtttcagaaagttcggaagaacaattaaatgaaacacaacttttgctatag

SEQ ID NO: 453 - DNA, 1025 bp, Artificial Sequence
  Synthetic
atgtatgaatacaaatttgatgtgagagttggttctaaaataatcaattgtcgcgcattcacgcttaaagaatatctagaacttattactgccaaaaataatggttccgtagaagtaattgttaaaaagctaatcaaagactgcacaaatgcaaaagatttaaaccgccaagaatcagaactattgctgattcatttatgggcgcattctcttggagaagttaatcacgaaaactcctggaagtgcacctgtggaactgaaataccaacccatataaatctattacatacacaaatagatgcaccagaagacctctggtatacactgggtgacattaaaattaaattccgataccctaaaatttttgatgataaaaatatagcccacatgatagtatcatgcatagaaacgattcatgctaacggtgaaagcattccagttgaagacttaaatgaaaaagaactagaagatttatattctatcatcacagagtcagatattgtagctataaaagatatgcttttaaagcctaccgtttatttggctgttccaattaaatgtccagagtgtggaaaaacccatgctcatgtaataagaggcctcaaagagttctttgagttactataatggcaaatattaataagctttattctgacattgacccggaaatgaaaatggattggaacaaagatgtttccagatcacttggattaaggtcaattaaaaacagtcttttgggaattattacaacaagaaaaggttcaagaccgtttgaccctgaatttggatgtgatttatcagatcagctttttgaaaatatgactcctcttactgctgacacggttgagcgcaatatcgaaagcgcagtaagaaactatgagccacgtattgataaattatcagttaatgtgataccagtttatgatgattatactctgatagtagaaatacgcttttcggtcatcgataaccctgatgatattgagcagataaaactgcaactggcttcgagtaatagggtataa

SEQ ID NO: 454 - DNA, 6240 bp, Artificial Sequence
  Synthetic
atggcaaacattattcgttgtaaattaccagatggtgttcatcgttttaaaccatttacggtagaagattatcgagattttttgttagttcgaaacgatatagaacatcggtcaccacaagaacaaaaagaaataattactgatttaattgatgattattttggagactatccgaagacttggcaaccatttatatttttgcaggtatttgtagggtcaataggtaaaactaaagtaccggtcacatttgtatgtccaaaatgtaaaaaagaaaagacagttccatttgaaatatatcaaaaagaattaaaggaacctgtttttgatgtagctaatgttaaaattaaattaaagtttccttctgagttttatgaaaataaagcaaagatgattactgaaaatattcattctgttcaagtagatgaaatatggtatgattggaaggaaattagtgaatcaagccaaatagaacttgttgatgccatcgagatagaaacattagaaaaaattctcgatgcaatgaatcctattaatttaactctacatatgtcatgctgtaataagtacattaaaaaatacactgatatagtagacgtgtttaagctgttagttaacccagatgagatatttactttttatcaaattaatcacacactcgtaaaaagtaattatagcttaaattcaataatgaaaatgattcctgccgagcgcggattcgtattaaaactgattgagaaggataaacaataatgagtatgttgcaacgccccggatatccaaatctcagcgttaaattatttgatagctacgacgcttggagtaataatagatttgttgaattagctgctactattaccacattaactatgcgggattctctttatggacgaaatgaaggaatgctgcagttttatgattctaaaaacatccatacaaaaatggatggaaatgaaataattcagatttctgtagctaatgcaaatgatattaataatgttaaaacacgaatttatggatgtaagcatttttccgtgtcagtagattcaaaaggtgataacatcattgctattgaattgggaactattcattctatagaaaatcttaaatttggtagacaatttttccctgatgcaggtgaatctataaaagaaatgcttggtgtcatttatcaggatcgcacattattaactccagcaataaatgctataaatgcttatgttcctgatattccatggactagcacatttgaaaactatttgtcatatgtaagagaagttgctctagctgtaggaagcgacaaatttgtatttgtatggcaagacatcatgggagttaacatgatggactatgatatgatgataaatcaagaaccatatccaatgattgtcggtgagccatctttaataggtcaattcatccaagaattaaaatatccattagcatatgatttcgtttggttgactaaatcgaatccttacaaacgtgatccaatgaaaaatgctactatctatgctcattcatttttagattcttcactgccaatgattactacaggaaagggtgaaaactctattgtagtgtcaagatcaggtgcttattctgaaatgacttataggaatggatatgaagaagctattcgtcttcaaactatggcacaatatgacggttatgctaaatgttctactgtcggtaattttaacttgactcctggtgttaaaattatttttaatgatagtaaaaaccaatttaaaacagaattttacgttgatgaagttatccatgaattatccaataataattcagtaactcatctatatatgttcactaatgcaacgaaactggaaacaatagacccagttaaggttaaaaatgaatttaaatctgatactaccactgaagaaagtagttcttccaataagcaataaagaagtttctattcctaaaatgggtcttaaacattataacattttaaaggatgttaaaggtcctgatgaaaatttaaaacttcttattgattctatttgtccgaatttatcaccggcagaagttgatttcgtttctattcatttattggaatttaatggaaagattaaatctcgtaaagaaatagatggctatacttatgacattaatgatgtttatgtatgccaaagattagaatttcaataccaaggaaatacattttattttagacctcctggaaaatttgaacaatttttaacggtgagcgatatgttatctaaatgcttgcttaaggtcaacgatgaagttaaagaaattaattttcttgagatgccagcattcgttttaaaatgggcaaatgatatttttacaactttagcaattcctggccctaatggtccaataaccggaattggcaatattattggattatttgaatgaaaaagccacaagaaatgcaaacgatgcgtagaaaagttatttcagataataaaccaacacaggaagcggctaaatccgcttctaacactttatctggacttaatgatatatctacgaaattggatgatgctcaagctgcttctgaattaatagctcaaactgtcgaagaaaaatcgaatgaaatagttggagcaattggtaacgtagaaaacgcagtgagtgatactactgccggttctgagttaattgctgaaactgtcgaaattggcaacaatattaataaagaaatcggtgaatcactcggaagcaaattagataaattaacaagtttactagagcaaaaaattcagacagctggaattcaacagactggaactagtttagccacagttgaaagcgctattcctgttaaagtcgttgaggatgatactgctgaatctgtgggtcctttattaccggctcccgaagcagttaataatgatcctgacgctgattttttccctacccctcagccagttgaacccaaacaagaatcgccagaagaaaaacagaaaaaagaagcatttaacttaaaattatctcaagctttagataaattaacaaagactgttgattttggatttaagaaatccatttcaattagtgataaaatatcaagcatgttatttaagtacaccatcagtgctgctattgaagctgctaaaatgactgcaatgatattggctgttgttgttggaatagacctgttgatggttcactttaaatattggtcagataaattttcaaaagcctgggatttatttaatactgactttactaaattctctagcgaaaccggaacttggggtcctttattacagagcatctttgattctattgataaaattaaacaactttgggaagcgggagattggggtggattgacagtagctattgttgaagggcttggaaaggttctttataatttaggagaacttattcagcttggaatggctaaattatctgcggcaattcttcgagtcattcctggcatgaaggatactgctgatgaagtagaaggaagagcactagaaaatttccaaaattctactggagcatctctcaataaagaagaccaagaaaaagtagcaaattatcaagataaacgaatgaatggagaccttggcccaatagcagaaggactagacaaaatctctaactggaaaactcgtgcatctaactggattcgtggtgtagataataaagaagcactgactactgacgaagaacgtgcagcagaagaagaaaaattaaagcagctttcacctgaagaaagaaaaaatgctttaatgaaggccaatgaagctcgtgccgcgatgattcgttttgaaaaatatgctgattcagctgatatgagtaaagactcaacggttaaatcagttgaagctgcctatgaagaccttaaacagcggatggatgacccggatttaaataattcgccggcagttaaaaaagaacttgcttctagatttgctaaaattgatgctacttatcaagagctcaagaaaaatcagcctaatgccaaacctgaaacttctgctaaatcaccagaagcgaaacaggtccaggttattgaaaagaacaaagcacaacaagctcctgttcaacaagcatctccttcaatcaataatactaataatgttattaagaaaaatactgtcgttcataatatgacacctgttacgagcacaactgctcctggtgtatttggcgcgactggagttaattaaggaataatatggcaattgttaaagaaataactgctgatttaattaaaaagtccggtgagacaatttcagccggacagagcactaaatcagaagtaggaattaaaacatacacagcccagtttccaactgggcgtgctagtggtaatgacactacaggggacttccaggtaacagatctatataagaatggattattatttactgcatacaatatgtcatctagggattctggaagtcttagatcgatgagatctaactactcttcttcatcttcgagtattttacgtacagccagaaacactattagtagtacagtatcaaaactatcaaatggattaatatcaaataataattcaggaacaataagtaaagctcctgtcgcaaacattcttttaccgagatctaaatctgatgttgatacatcatcacatagatttaatgatgttcaagaaagccttatcagtagaggcggaggtactgctactggagtgctaagtaatattgcttcaaccgcagtatttggggcgttggaaagtataacacaaggtataatggctgataataatgaacagatttatacgacagccagaagtatgtatggtggtgctgaaaatagaactaaagtgtttacatgggatttaactccacgttcaacagaagatttaatggctattattaatatctatcaatattttaactatttttcttatggtgaaacgggtaaatctcaatatgctgctgaaataaaggggtatttagatgattggtatcgttctacgttaattgaacctttatctccggaagacgcagctaaaaataaaacactatttgagaaaatgacatcgagtttaactaacgttctagtagtttcaaacccgacggtttggatggtgaaaaactttggtgcaacatctaagtttgatggaaaaacggaaatatttggtccatgccaaatacagagcatcagatttgataaaacacctaacggtaactttaacggattagctattgctccaaatctccctagtacatttactctcgagattactatgagagaaattatcacgttaaaccgtgcttctttatatgcggggactttttaatgtattctttagaggaatttaataatcaagcaataaacgcagatttccaacgtaataatatgtttagctgcgtttttgcaacaactccatcaactaaaagctcttcgttgataagttcaattagcaacttttcttataataacttgggcctaaattcagattggttaggattaactcaaggtgatattaatcagggaattacaacgctaattacagctggcacacaaaaactaataagaaaatcgggggttagtaaatatcttattggtgccatgagtcaacgtacagttcaaagtttattaggctcatttacagttggtacatatttaattgacttctttaacatggcatataactcatctggattgatgatatactctgtaaaaatgccagagaatagattatcctatgaaactgattggaactacaactctcctaatattcgtataactgggagagaattagaccctttggttatttcatttagaatggattcagaatcgtgtaattaccgtgcaatgcaagactgggttaatgctgttcaagacccagtaactggattacgtgctctgccacaagatgtcgaggcagatatccaggttaatcttcattctcgtaatggattgcctcatactgcggtgatgttcaccggatgtattccagtgtcagtgagcgctcctgagttatcatatgatggagataaccaaataactacatttgatgttacttttgcgtatagagtcatgcaggctggagcagttgataggcaagctgcgcttgaatggcttgaatctgctgctataaatggtattcaaagctcttctggaaataatggaggtgttactgaactatctagttcgctttcacgacttagtagattaggaggaactgcaggaagcatttcaaacattaatactatgacagggattgtcaattcgcagagtaaaatattaggagcaatataa

SEQ ID NO: 455 - DNA, 291 bp, Artificial Sequence
  Synthetic
atgaaatcttctttgcgctttttaggtcaagaacttgtagttgaaggcgttattcctgctgataatgcttttaacgaagcggtttacgatgaatttattaaaatttttggaacagataaaaagttcggaatttttccttctgaaaatttttcaaagccagaacagactgaaagcattttccagggtgtagtaacaggtaaatttgagtcagaagctccggtaaaaattgaagtttatattgaagacagtttagttgcttcagtttctgctttcatttcattccgtaaataa

SEQ ID NO: 456 - DNA, 4155 bp, Artificial Sequence
  Synthetic
atggaactcattacagaattatttgacgaagatactactcttccgattacaaacttaaatccaaagaagaaaataccacaaattttttcagttcatgttgatgatgcaattgaacaaccaggctttcgtttatgtacctatacatctggaggtgatactaatcgcgatttaaaaatgggcgataaaatgatgcatattgttccttttacattaactgctaaaggttcaattgctaaattaaaaggtcttggtccaagcccaattaattatatcaattcagtttttactgttgcaatgcaaacaatgcgtcagtataaaattgatgcttgtatgcttcgtattcttaagtctaaaactgctggtcaagctcgacaaattcaagttattgctgatagacttatccgtagtcgttcaggtggcagatacgtccttcttaaggaactctgggattatgataaaaagtatgcatatattcttatacatcgcaaaaatgtatcactagaagacattccaggagttccggaaattagtaccgagctctttactaaagttgaatcgaaggtcggtgatgtttatatcaataaagatactggagctcaagtaactaaaaacgaggcaattgcagcatctattgcacaagaaaatgataaacgtactgaccaagctgtaatcgttaaagttaaaatttcccgtagagcaattgcgcaaagtcaatcattggaatcttctagatttgaaagtgaattattccagaagtatgaatctaccgcagctaatttcaataagcctgctaccgctcctttaattcccgaagcagaagaaatgaaaattggaattaattcattagcttctaaaacaaaggcagcaaaaattattgccgaaggaactgcgaatgaacttcactatgactataaattcttttcaaaaagtgaggttgatgaagtttctgaaaaaattaaagatgtaatttttaacgcgattaaaaatgaaccaactacttcaataaaatgtttagagaaatacgcggcagctgtcaatcaattctttgaagaatataaagataattggcttgataaacataataaaactcgtaaagggcagccagatgaagtctggggagaaataactaaaaatgcctggaatgcagcaaaaactaaattcctcaaacgaatgatttatagtttttctggaattggtgctggtccaatgattgatattactattgcttgtgatggttctaaatatacaccatcacaaaagcgcggtattagagagtattgtggttcaggatatacagacattaataatcttcttttaggtcgttacaatccagaacgatatgatgtaatgagtgaaaaagaaattgaatctgctataaataatttagattcagcttttgaaaatggtgaccgcataccggaaggcattacagtttatcgtgctcaaagtatgactgctcctatatacgaagcgctagttaaaaataaagtgttctatttcagaaattttgtatctacttctttaactcctatcatttttggacgttttggaattacacatgctggtattggtcttttagaaccagaagctcgcaatgaattaacagttgataaaaatgaagaaggaataactattaatccaaacgaaataagagcgtataaagaaaatcctgaatacgttaaagttcaaataggatgggcaattgatggagctcataaagttaatgttgtatatccaggaagtctcggaatagcaacagaagctgaagttattctaccgcgcggattgatggtcaaagttaataaaataactgatgcttctaataatgacggaaccacgtctaataatacaaaactcattcaagctgaagttatgaccacagaagaactcaccgaatcggtaatctatgacggagaccgtttaatggaaaccggcgaagtagttgcaatgacaggtgatattgaaatagaagacagagttgactttgcatcatttgtttcatcaaatgttaaacagaaagtagaatcatctctcggaattattgcgtcttgcatagatattacaaacatgccttacaagttcgttcaaggataaatcatggaacttattacagaattatttgacggcgcttcggcgccggttgttaacttaaatcctaagcataaaataccacaaatttttgctattcaagccggcgaagaaagcgtgcttcctggatttagattttgtacatacacctctggtggtgatacaaataaaaacgttaagccaggcgataaaatgatgcatatcgtaatgataggtgtcaacgagaaattatcgctggttaagcttagaaacttgggtggaaatccaattggcgtcattaatgctgtttttgatactgctcttcaaacaatgaaacagtataaaatcgacgcatgcttattccgcgtactaaaaagtaaaacaaatggcgcagctcgtcaaatgcaagttattgctgaccgtttagtacgtactaaaggagcaggtcgatatgttcttttaaaggaaatctgggactatgataaaaagtatgcatatattatggtttaccgtaaaaatgccaatttagaagacattccaggtgtacctcctatttcaactgagttattcgcaaaagttgaatcgaaggtcggtgatgtttatgtagatgttaaaacaggtgatgctgttcctaaagctgtcgctgttgctgcttctattgctttagaaaatgataaacgtactgaccaagcggttattcagaaaactaaaattagtcgtcgattagcagcacaagctcaatattctactgtcgatgcttcacttcagggtgatagcttcgctgccaagaaatatcaagagtttgaatctaaagttccggtatataaagcagaaggaccaatgaactctggcgttattcagattggttcaaacttcagcaaaggagctatcggtggtatgagaagtgcttctcgttttaaatctagcgattatgaactagaaaacttccgaaatcatattgcattagcccatgcacgtttacgtgatccatctatcaagttacagagcgatataacatatcaaggttctcaagaatatttaaagaataaagaattctttgattataaaactgataaaattttaagtgatcttgctgatattaatatttctaatagctttgatgttattaagaaaattatcaatgatttggttaaaggttctaaagctacgccagatgaaaagacagttattattcaatttgtcatgaatggcatttataaattgattaatgaatctgctgcccaggcatatgaatatgcaagcactgaagtaactccaaaaggactgactcaggctgagtctgatgtaattgaagattattgtgcagattcatatgttgaaatgaactcgttccttttgggtaaaccagattctacccgtgaagaatatatggaacgtgctattaagcacatcgagacgttggattctgcattcgctaaaggttcagttcttcctccaggaactacgctttatcgcggacaagaagttacctttaaaactttgcgtcacaacattgaaaacaaaatgttctatttcaagaacttcgtatcgacatcacttaaaccaaatatctttggcgagcatggtaaaaactatatggctctagatgattccggtgcagtattttctggagaaggagaaggttccgttgatgcagaagatttgatgcatatgggtagtcattctacatatgctaatgaagatgctgaaactagcgtgggtatggtaattaaaggagctgagcgaatcaaagttatcgttccaggtcatttatcaggatttccatcagaagctgaagttattctaccgcgtggaattttactgaagattaataaagtaagtacgtactttatgaaagaaactgcttataacaagtatctaatcgaaggtacaatcgttcctccttctgaacaattagaagaatcagtatatgatggagaccatttaatggaaactggtgaagttcgtccaatggctggatttaatcaattccttgtagaagaatcaaaagaagaggaaaacgaagtttctcaaatattagcttctttggttaacatcaacggaatgtctaaaaagttcaaaatgtag

SEQ ID NO: 457 - DNA, 366 bp, Artificial Sequence
  Synthetic
atgaactacatcaactttgaacgtaaatatgtttctaatggtattgcaggttctattgatactatctgcctttggaaacatcaaaatggatcagtatgcgaaattgaacagtatatgactcctaactatgtttatatgcgatttgaaaatggcatcacggtttcaatcacaatggaaggttccaactttaaaatcgctctggatgatgattttcgtcaacgcgatttagggactcatccttgctggaatggtgctaatcgcaagcttttggttaaaacttggattcgtcatattctgagtaacagagctaaacctgagcatcttgaagcaatctttgatgtagttcttaacgaatttgatatttaa

SEQ ID NO: 458 - DNA, 177 bp, Artificial Sequence
  Synthetic
atggcaaaacaagctaaagcaaagaaagcagttgaaaagaaagttggtgattctaaacgcgctggctacaagcgtgggtcgaactctcgtatcaatcaaactgttgagaagatcatgcgccgagcacgtgcggttcttcgagatgatgcttctcgttttggtaagcagaaagcataa

SEQ ID NO: 459 - DNA, 249 bp, Artificial Sequence
  Synthetic
atgattaaacaattacaacacgctcttgaactgcaacgaaacgcatggaataatggtcacgaaaactatggcgcatctattgatgttgaagccgaagctcttgaaatcctgcgttatttcaaacatctgaatcctgctcaaactgcattagctgccgagcttcaggaaaaagatgaacttaaatatgctaagcctctggcttctgccgcgcgaaaagcagttcgtcactttgtggtaacattgaagtaa

SEQ ID NO: 460 - DNA, 336 bp, Artificial Sequence
  Synthetic
atgtctgaagtacaacagctaccaattcgtgctgtcggtgaatatgttattttagtttctgaacctgcacaagccggcgatgaagaagttacagaatcaggacttattatcggtaaacgtgttcaaggtgaagttcctgaactgtgtgtaattcactctgtcggtcctgatgttcctgaaggtttttgtgaagttggtgatttgacttctcttccagttggtcaaattcgaaacgttccgcatccttttgtagctctgggtcttaagcagccaaaagaaattaaacaaaaattcgttacctgtcattataaagctattccgtgtctttataagtga

SEQ ID NO: 461 - DNA, 1698 bp, Artificial Sequence
  Synthetic
atgctgctaagtgaaaaaccgattactgttaaagaattccaagaaaaagttaagctatttgcgcaggaattggtaaataaggtttctgaacgatttcctgaaacatcggttcgtgttattaccgaaactcctcgttcagtattagtaattgtgaatccaggtgatggcgatcaaatatcgcatcttaaactggattttgatggattagttgaagcacaaagggtgtatggcgtactatgatgaatttaactgatataattgataattgtcttgaaaatgatactggcgatcatagagcgcttgactctgaaacagcaaagttcattagaataactttaatgaatgatactctggtgaatagtattcatccttctgtgtatgatgctattattgtgacgaagtatccagttgagcttcataaaaagatgactggcgcagtttttattgataagaaaaaccgctttaaagatgggcagaatataattagttctgttattaaaagtataactaaacttcgtcacgaaatttatcgtgttgaaactgctaaatctgcttatctggtgattatgaaatgaaagcgagtacagtacttcaaattgcatatttagtatcgcaggaatcaaaatgttgctcctggaaggtaggagcagtaattgaaaagaatggacgtattatttctactgggtataatggttcacccgcagggggtgtgaactgttgtgattatgctgctgagcaaggttggttgctgaataagcctaaacatactatcattcaaggccataagcctgaatgcgtatcatttggttcaactgatcgttttgtcttggcgaaagaacatcgtagtgctcactctgaatggtcgtctaaaaatgaaattcatgctgagctaaatgcaattttgtttgctgcacgaaatggttcttctattgaaggtgctactatgtatgtaacactttctccttgtccagattgtgcaaaagcgatagctcaatctggtattaaaaagctggtttattgcgaaacatatgataaaaataaacctggctgggatgatattctgcgaaatgcaggtattgaagtgtttaatgttcctaagaaaaacttgaataagttaaactgggaaaatatcaacgaattctgcggtgaataatgaaatttcgtttggtaaagctcacagcaattagttcttattctaatgagaacatctcgtttgctgtagagtataagaaatattttttctctaaatggaaacagtattataagacaaattgggtttgtattgataaaccatatagttggaaatctgatttagaaaaattccaaaaattactttccacccttaaagaacgtggaacaactcatattaaaactgtaataggtaaataaatgaaactgacaactgagcagaaagtagcaattcgtgaaattttgaaaactaaattgtccatgggtgtttcaaacgtagtttttgaaaagtctgatggtactattcgtactatgaaaggtactcgtgatgcagactttatgccaaccatgcaaaccggtaaattgactgaatctactcggaaagaatctacggatatgattccagtatttgatgttgaacttggcgcttggcgaggtttttctattgacaaattgatttctgttaatggtatgaaagttgagcatttgcttcaatttattggtaaataa

SEQ ID NO: 462 - DNA, 276 bp, Artificial Sequence
  Synthetic
atgtttcctacttattctaaaatcgtagaagtagtgtttagccaaattatcgctaataatatgtttgaaaaacttgataacgcagccgagcttcgaatccatgctcaagtgactcatgtattgaacactttgcttccagaccaggtggattctgttgccattacgctgtatccaggttccgcgcatatcattgttgtattcggtcttgatgctgagctagtcatcaaaggcgatattcgttttgaatcgcagacagcagaattcaaagcaatttaa

SEQ ID NO: 463 - DNA, 3683 bp, Artificial Sequence
  Synthetic
atgaaacaataccaagatttaattaaagacatttttgaaaatggctatgaaaccgatgatcgaacaggcacaggaacaattgctttgttcggtactaaattacgctgggatttaagtaaaggttttcctgcagtaacaactaaaaagctcgcctggaaagcttgcattgctgagctactttggtttttatcaggaagcacaaatgtcaatgatttacgattaattcagcatgattcattaattcaaggcaaaacagtctgggatgaaaattacgaaaatcaagcaaaagatttaggataccatagcggtgaacttggtccaatttatggaaaacagtggcgtgattttggcggtgtagaccaaattgtagaagttattgatcgtattaaaaaactgccgaatgataggcgacaaattgtttctgcgtggaatccagctgaacttaaatatatggcattaccgccttgtcatatgttctatcagtttaatgtgcgtaatggctatttggatttgcagtggtatcaacgatcagtagatgtttttcttggtcttccatttaatattgcatcatatgctgcgttagttcatattgtagctaagatgtgtaatcttattcctggagatttgatattttctggcggtaatactcatatctatatgaatcacgtagaacaatgtaaagaaattttgcgtcgtgaacctaaagagctttgtgagctggtaataagtggtctaccttataaattccgatatctttctactaaagaacaattaaaatatgttcttaaacttaggcctaaagatttcgttcttaacaactatgtatctcacccgccaattaaaggaaagatggcggtataattttaatttaattgcgaggatatatgattttacgatttaaagatacttctggtgtcgttctttttacacttcctaatccaagcgagttagaagttccaggaccaaatcagcctattatcatttatggcaaaaaatattatactcataaaatgactcgtgagtattttgataataaaatttctacagttaaaacttcttcagattgttactatgatattactgttttaacggaaaaacaatatgacgaattatcgccgcgcgggccgtctatgccaggtagtgaataaatataaatccgactttgatgttaatattcaccgtggtacattttggggaaattacgtcggtaaagatgctggcagccgggaggctgccattgaattattcaaaaaagattttatacgtcgaattaaatccggagaaataactaaagaacatttagagcctttacgtggaatgaggctaggatgcacatgtaaaccaaagccgtgtcatggtgatataatagctcatatagttaaccgattgtttaaagacgattttcaagttgaggacttatgcaattaattaatgttatcaaaagtagtggtgtttctcagagctttgacccgcaaaaaattattaaagttttatcttgggcagctgaaggaacatctgtagatccttatgaattatatgaaaatattaaatcatatctccgtgatggaatgaccactgatgacattcagactattgtcattaaggctgctgcgaattctatttcggttgaagaacctgattatcaatatgtagctgcacgctgtttaatgtttgctcttcgtaaacatgtttatgggcagtatgaaccgcgttcatttattgaccatatttcttactgtgtaaatgaaggtaaatacgaccctgaattgttgtcaaaatattctgcagaagaaattacatttttagaatcaaaaattaagcacgagcgggatatggaatttacttattccggggcgatgcaattaaaagaaaaatatctcgttaaagataaaaccactggtcaaatttatgaaactccacagtttgcatttatgactattggaatggcattgcatcaagatgaacctgttgacagattaaaacatgttattcgtttttatgaagcagtatctactcgacagatttcactgccaactcctattatggctggttgccgtactccaactcggcagtttagttcatgcgttgttattgaagctggtgattcattaaagtcaattaataaagcttctgcttcaattgttgaatatatttctaaacgcgctggaattggaattaacgttggtatgattcgtgccgaaggttctaagattggcatgggtgaagtacgccatactggtgttattcctttttggaaacattttcagactgctgttaaatcatgttcacagggtggaattcgtggcggcgctgctactgcttattatcctatttggcatttggaagttgaaaatcttctcgttttgaaaaataacaaaggcgtagaagaaaaccgcatccgtcatatggattatggtgttcaactgaatgatttgatgatggaacgattcggaaagaacgattacattactttgttcagtccgcatgaaatgggtggagagctgtattattcttattttaaagaccaagaccgtttccgtgaattatacgaagcagcagaaaaagaccctaatattcgtaaaaagcgtattaaagcccgtgaactatttgaattgctcatgactgaacgttcaggaacagcaaggatttatgtgcagttcattgataatacgaataactatactccgtttattcgtgaaaaggcacctattcgtcagagtaacttgtgctgtgaaattgctattccaacaaatgatgtgaatagtcctgatgctgaaattggattgtgtactctctctgcattcgtactagataattttgactggcaagaccaagataaaattaatgaattggcagaagttcaagttcgtgctcttgataatctgttggattaccaaggatatccagttcctgaagcagaaaaagctaaaaagcgtcgtaaccttggtgtaggtgttactaactatgcagcttggctggcaagtaactttgcttcttatgaagatgctaacgatttaacacatgaactatttgagagattacagtatggactcattaaagcatccattaagctcgccaaagaaaaaggaccttgtgaatattattcagacactcgttggtctcgaggcgaattacctatcgactggtacaataaaaagattgaccaaatcgcagctccaaaatacgtttgtgactggtcgtcgctgcgggaagaccttaagctctttggcatccgtaatagcacattatcagcacttatgccatgtgagtcatcttcccaagtttctaacagtacaaacggtatcgagcctccacgtggaccagtctctgttaaagaatcaaaagagggttcctttaatcaagtcgtgcccaatattgaacataacatagacctatatgattatacatggaaattagctaagaaaggtaataaaccttatcttacgcaggtagctattatgctgaaatgggtatgtcaatcagcttcagcgaatacatattatgacccgcagatttttccaaaaggaaaggttccaatgtcaataatgattgatgacatgttatacggatggtattatggcattaaaaatttctattatcataatacccgcgatggttctggtactgatgattatgaaatagaaactccaaaagctgaagattgttcatcctgtaaattatga

SEQ ID NO: 464 - DNA, 1448 bp, Artificial Sequence
  Synthetic
atgagattacaacgccaaagcatcaaagattcagaagttagaggtaaatggtattttaatatcatcggtaaagattctgaacttgttgaaaaagctgaacatcttttacgtgatatgggatgggaagatgaatgcgatggatgtcctctttatgaagacggagaaagcgcaggattctggatttaccattctgacgtcgagcagtttaaaactgattggaaaattgtgaaaaagtctgtttgaaggagatgatatgatttttgtatttgaatttatgaatgatgaattcgattatgcaatttttaacgcattgcataatcctgatttaaatgaatttaatgaaatgttttctgacgctttgagtatgtcagaagaatactgcggagaatgtcaacgtgtttgtgtgacagtctttgaaaacaaagaaaagacgtatgaagaattattctttgacgctaataaagccactgaatggtttattgaaaggggttttgcgtaatgattaaattggtattcgcttattctccaactaaaacggtcgaaggctttaatgaattagcattcggtttatgtgatggtttaccatggggacgagttaaaaaggacctccagaattttaaagctcgtactgaaggtacaattatgattatgggtgctaaaacgttccagtcattgtctacattacttcctggtcgtagccatattgtagtatgtgacctcgagcgtgattatcctgaaactaaagacggtgatttagcacatttctatattacatgggagcagtacataacttacatttctggcggttcaattcaagtgtcaagtcctaatgcaccattcgaggctatgcttgatcagaattctaatgtaagcgtaattggcggacccgctttgttatatgctgcattaccttgtgcggatgaagtagttgtttctcgcatcgttaaaaggcatcgtgttaattcaacggttcaattagatgcaagttttcttgatgatataagcaagcgtgaaatggttgaaacccattggtataaaatagatgaagtaacaacccttacggaatcagtgtataaatgaaataacgcgtggcggaaaatatgaactttaattattaccctattctattagaaaaagacgcgaaacaaccaaaatggcagggtcctcagtttattaaaggcgtctatcaattagtagttcctaaagacaagatttatagcagttgtttcactgaatccgcttgcagtattttcggtaatagttctccgtattggaattttgatataaaactggatagaaatatcgatatttggttgaaagccatggatattggcaatattacgtttgatgagaataattatcatattattggtcgcttttctaaacgcggtaaagaattatatttcactcctgaaatcgaaagaaaatttgatgctaaaccgtattga

SEQ ID NO: 465 - DNA, 366 bp, Artificial Sequence
  Synthetic
atgtatattggcaaaaagtatgaacttgttccaagacttattgatacatttattaattatcgcccacgttctaattcatcaatagttaaaattattgaagaaaatggcgggtggtttgaagttaaagaaactttctttgttgatggatttagagcaataaaacacattgaatgcgcaaatggaaagcatttttactttaacatttgtgaagatgaatttcattgttttcgtgagtataaagaacagacttctgaagaagatgaaatcgaagacaaggtttctggcgtaacaaaaattcactgcattgtagacgaaaacaatgtagatgaaatcattgaacttttgcgaaaaactttcaaaaagtag

SEQ ID NO: 466 - DNA, 228 bp, Artificial Sequence
  Synthetic
atggctaaagttgatattgacatcgttgattttgaatatattgaagaaattattcgtaatcgttatcctgaacttagtatcacaagcgtgcaagattctaagttttggagtattcaaatcgttattgaaggtcctcttgaagacctcacccgctttatggctaatgaatattgcgatggtatggattctgaagacgcagaattttacatgggactgattgaacaataa

SEQ ID NO: 467 - DNA, 909 bp, Artificial Sequence
  Synthetic
atgtttaaacgtaaatctactgctgaactcgctgcacaaatggctaaactggctggaaataaaggtggtttttcttctgaagataaaggcgagtggaaactgaaactcgataatgcgggtaacggtcaagcagtaattcgttttcttccgtctaaaaatgatgaacaagcaccatttgcaattcttgtaaatcacggtttcaagaaaaacggtaaatggtatatcgaaaattgctcatctacccacggtgattacgattcttgtccagtatgtcagtacatcagtaaaaatgatttgtacaacactgacaataaagagtacggtcttgttaaacgtaaaacttcttactgggctaacattcttgtagtaaaagatccagctgctccagaaaacgaaggtaaagtatttaaataccgtttcggtaagaaaatctgggataaaatcaatgcaatgattgcagttgatgttgaaatgggtgaaactccggttgatgtaacttgtccgtgggaaggtgctaactttgtactgaaagttaaacaagtttccggatttagtaactacgacgaatctaaattcctgaatcaatctgcgattccaaacattgacgatgaatctttccagaaagaactgttcgaacaaatggttgacctttctgaaatgacttctaaagataaattcaaatcgttcgaagaactgagcactaagtttagtcaagttatgggaactgctgctatgggtggtgccgcagcgactgctgctaagaaagctgataaagttgctgatgatttggatgcattcaatgttgatgacttcaatacaaaaactgaagatgattttatgagctcaagctctggcagttcatctagtgctgatgacacggacctggatgaccttttgaatgacctttaa

SEQ ID NO: 468 - DNA, 2162 bp, Artificial Sequence
  Synthetic
atggatttagaaatgatgctggatgaagattacaaagagggaatttgctttattgactttagtcaaattgcgctttcaactgctttagtaaacttcccagataaagaaaaaattaatttatcaatggttcgtcatttgatattgaactcaattaagtttaatgtcaaaaaagcaaaaacgcttggatacactaaaatcgtgttgtgtattgataacgcgaaatctggatattggcgtcgtgattttgcttattattataagaaaaaccgtggaaaagcacgagaagaatctacttgggactgggaaggttattttgaatccagccataaagttatagatgaattgaaagcttatatgccatacattgttatggatattgataagtatgaagcggatgaccatattgctgttcttgttaaaaagttctctttagaaggacataagattttaatcatttcgtcggatggtgactttacacagcttcacaaatatccaaatgttaagcaatggtctccaatgcataagaaatgggttaaaattaaaagcggttctgctgaaattgactgtatgactaaaatccttaaaggcgacaaaaaggataacgttgcttcagttaaagtacgatctgacttctggtttaccagagttgaaggtgaacgaactccttcaatgaaaacttcaatcgttgaagccattgctaatgaccgtgagcaagctaaggtgcttctcacagaatctgaatataatcgttataaagaaaatttagttctaattgattttgattatattcctgataatattgcttcaaacattgtgaattactataattcatataaattaccaccgcgtggcaaaatttattcatattttgtaaaagcgggtctttctaaattaactaatagcattaatgaattttgaggtgaataatggctaaaaaagaaatggttgaatttgatgaagctatccatggcgaagacttggctaaatttattaaagaagcatctgatcataaactgaaaatttccggttataatgaactgattaaagatattcgaattcgtgctaaagatgaacttggcgttgatggtaagatgtttaatcgtctattagctttgtatcataaagataaccgtgatgtgtttgaagctgaaactgaagaggtagttgaactttatgacacagttttctctaaatgatattcgtccggtcgatgagaccggtctttcagaaaaagaactttcaatcaagaaagaaaaggatgaaatagcaaagcttcttgatcgtcaagaaaatggatttattattgaaaaaatggtagaagagtttggaatgagttatcttgaagctacaacagcattcttagaagaaaattctattcctgaaactcaatttgctaaatttattccttcgggtataattgaaaaaattcagtcagaagctattgacgaaaatcttttacgtccttctgttgttcgctgtgaaaaaactaatacattagattttctactatgattaaattccgcatgcctgctggtggtgaaagatacattgatggtaaatcagtttataaattatacttaatgataaaacagcatatgaatggaaagtatgatgttattaagtataattggtgcatgcgggtgtctgatgccgcttatcaaaagcgaagggataagtattttttccagaagttatcagaaaaatataaattaaaggaacttgctttaatttttataagtaatttggttgctaaccaagatgcttggattggtgacatctctgacgctgatgcacttgtgttttatcgtgaatatatcggacgcttaaagcaaattaaatttaagtttgaagaagatattcgcaacatttattattttagtaaaaaagttgaagtttctgcttttaaagaaatctttgaatataatccaaaggttcaatcaagttatatttttaaactgcttcagtcgaatataatttcgtttgaaacgtttatcttgcttgattcgtttttaaatataattgataaacacgatgaacagactgataatttagtctggaataattattctataaagttaaaggcttatagaaaaattttaaatattgattcacagaaagctaaaaatgttttcattgaaactgtgaaatcttgcaagtattaa

SEQ ID NO: 469 - DNA, 4997 bp, Artificial Sequence
  Synthetic
atggccgagattaaaagaaagttcagagcagaagatggtctggacgcaggtggtgataaaataatcaacgtagctttagctgatcgtgccgtaggaactgacggtgttaacgttgattacttaattcaagaaaatacagttcaacaatatgatccaactcgtggatatttaaaagattttgtaatcatttatgataaccgcttttgggctgctataaatgatattccaaaaccagcaggagcttttaatagcggacgctggagagcattacgtaccgatgcaaactggattacggtttcatccggttcatatcaattaaaatccggtgaagcaatttcggttaatactgcagctggaaatgacatcacgtttactttaccatcttctccaattgatggtgatactatcgttctccaagatattggaggaaaacccggagttaaccaagttttaattgtagctccagtgcaaagtattgtaaactttagaggtgaacaagtacgttcagtactaatgactcatccaaagtcacagctagttttaatttttagtaatcgtctgtggcaaatgtatgttgctgattatagtagagaagctgtaattgtaacaccagcgaatacttatcaagcacaatcaaacgattttatcgtgcatagatttacttctgccgcaccgataaatattaaacttccgagatttgctaatcacggagatattattaatttcgttgatttagataaactaaatccactttatcatacaattgttactacatacgatgaaactacttcaatacaagaagatggaactcattctattgaagaccgtacatcaatcgacggtttcttgatgtttgatgataatgagaaattgtggagattgtttgacggggacagtaaagcacgtttacgtatcataacgactaattcaaacattcttccaaatgaagaagttatggtatttggtgcgaataacggaacaactcaaacaattgagcttcagcttccaactaatatttctgttggtgatactgttaaaatttccatgaattacatgagaaaaggacaaacagttaaaatcaaagctgctgatgaagataaaattgcttcttcagttcaattactgcaattcccaaaacgctcagaatatccgcctgaagctgaatgggtaactgtccaagaattagtttttaacggtgaaactaattatgttccagttttggagcttgcttatattgaagattctgatggaaaatactgggttgtacagcaaaacgttccaaccgtagaaagagtagattctttaaatgattctactagagcaagattaggcgtaattgctttagctacacaagctcaagctaacgtcgatttagaaaattctccacaaaaagaattagcaattactccagaaacgttagctaatcgcactgctactgaaactcgcagaggtattgcaagaatagcaactactgctcaagtgaatcagaacaccacattctcttttgctgacgatattatcatcactcctaaaaagctgaatgaaagaactgctactgaaactcgcagaggtgttgctgaaattgctacgcagcaagaaactaatacaggtactgatgatactacaatcatcactcctaaaaagcttcaagcccgtcaaggttctgaatcattatctggtattgtaacttttgtatctactgcaggtgctactccagcttctagccgtgaattaaatggtacgaatgtttataataaaaacactaataatttagttgtttcacctaaagctttggatcagtataaagctactccaacgcagcaaggtgcagtaattttagcagttgaaagtgaagtaattgctggaaaaagtcaggaaggatgggcgaatgctgttgtaacgccagaaacgttacataaaaagacatcaactgatggaagaattggtttaattgaaattgctacgcaaagtgaagttaatacaggaactgattatactcgtgcagtcactcctaaaactttaaatgaccgtagagcaactgaaagtttaagtggtatagctgaaattgctacacaagttgaattcgacgcaggcgtcgacgatactcgtatctctacaccattaaaaattaaaaccagatttaatagtactgatcgtacttctgttgttgctctatctggattaattgaatcaggaactctctgggaccattatacccttaatattcttgaagcaaatgagacacaacgtggtacacttcgtgtagctacacaagttgaagctgctgcaggaaaattagataatgttttaataactcctaaaaagcttttaggtactaaatctaccgaatcgcaagagggtgttattaaagttgcaactcagtctgaagctgtggctggaacgtcagcaaatactgctatatctccaaaaaatttaaaatggattgtgcagagtgaaccttcttggagagcaactactacggtaagagggtttgttaaaacttcgtctggttcaattacattcgttggtaatgatacagtcggttctacccaagatttagaactttatgagaaaaataattatgcagtatcaccatatgaattaaaccgtgtattagcaaattatttgccgttaaaagcaaaagctgtagatagtaatttattggatggtctagattcatcccagttcattcgtagggatattgcacagacggttaatggttcactaaccttaacccaacaaacgaatctgagtgcccctcttgtatcatctagtactgctacgtttggtggttcagtttcggcaaatagtacattaactatttctaatactggtacgacttcttctcgatttacatttgagaaaggtcctgcttctggtagtaatgctgattctgcattgtatgttcgtgtatggggtaataagtacagcggcggttctgatgtaactcgtgcaacgattatagaattctctgatgctaccggctctcatttctattctcaaagagatacgtcaaataatgtgttgttcaacatttcaggtacgatgcaatcagtcaacgctagcgttcgtggtgttctgaacgttacaggtgtctcaacgtttaatagttcagttacagccaatggtgaattcatcagtaaatcaccaaatgcttttagagcaataaatggaaattacggattctttattcgtaatgctggtaatgacacctattttatgctcactgcagcaggtgatcagagcggtggatttaatggattacgtccattatcaattaataatcaatccggtcaggttacgattggtgaaagcttaatcattgccaaaggtgctactataaattcaggtggtttgactgttaactcgagaattcgttctcagggtactaaaacatctgatttatatacccgtgcgccaacatctgatactgtaggattctggtcaatcgatattaatgattcagccacttataaccagttcccgggttattttaaaatggttgaaaaaactaatgaagtgactgggcttccatacttagaacgtggcgaagaagttaaatctcctggtacactgactcagtttggtaatacacttgattcgctttaccaagattggattacttatccaacgacgccagaagcgcgtaccactcgctggacacgtacatggcagaaaaccaaaaactcttggtcaagttttgttcaggtatttgatggtggaaaccctcctcaaccttctgatattggtgctttaccttctgataatgcaacaatcggaaacttgacaataagggatttcttaaggattggtaatgtccgcattattccagaccctgtgaataaatctgttaaattcgagtggattgaataagaggtattatggaaaaatttatggctaagtttggacaaggatacgtccaaacgccatttttatcggaaagcaattcagtacgatttaaattaagcatagcgggatcttgcccgctttctacagcaggaccatacgttaaatttcaagataatcctgtaggaagtcaaacatttagcgcaggtcttcatttaagagtttttgacccttccaccggagcattagttgatagtaagtcatatgctttttcgacttcaaatgatactacatcagctgcttttgttagcttcatgaattctttgacaaataatagaattgttgctatattaactaacggaaaggttaattttcctcctgaagtagtatcttggttaagaactgcaggaacgtctgcttttccatctgattctatattgtcaagattcgacgtatcatatgctgctttttatacttcttctaaaagagctattgcattagagcatgttaaactgagtaatagaaaaagcacagatgattatcaaactattttagatgtcgtatttgacagtttagaagatgttggagctaccgggtttccaagaagaacgtatgaaagcgttgagcaatttatgtcagcggttggtggaactaataacgaaatcgcgcgtttaccaacttcggctgctataagtaaattatctgattataatttaattcctggtgatgttctttatcttaaaacacagctatacgccgatgccgatttacttgctcttggaactacgaatatatccattcgattttataatgcatcaaatggatatatttcctcgacacaagctgaatttaccgggcaagctggtgtttgggaattaaaagaagattatgtagttgttccagaaaatgcagtaggatttacgatatatgcacaaagaactgcacaagctggtcaaggtggaatgaggaacttaagcttttctgaggtatcaagaaatggtagtatttcgaaacccgctgaatttggtgtcaatggtattcgagttaattatgtctgtgaatctgcttcacctccggatataatggtacttcctacacaagcatcgtctaaaactggtaaagtgtttgggcaagaatttagagaagtataa

SEQ ID NO: 470 - DNA, 417 bp, Artificial Sequence
  Synthetic
atgtttactacagctgaactaaaacgagcaaaagctaagaaagggcaaggaaaatataaagctgaattagttaaagaacttcagtttgctgaggctgaattgaattcaatgattattcaaaatgctccagaaactgaaattgctcttaaacgtattgcgaataagtgtcttcgtgatgcaatcgtcgatcttttagcggattattgagtaaaatgaaaatcgttgagattgaactatgagttcattatggtggtgttttgtttggttaattagtattccattaatttgtttaacatttacttttgtgatgaggttattatgaaaatttttaattctgtacttattgcttgtgcgtggtgggttgcacaagtttcggcagtagtgattggtattcacatttattacgaatatttttaa

SEQ ID NO: 471 - DNA, 1166 bp, Artificial Sequence
  Synthetic
atgtacaatattaaatgcctgaccaaaaacgaacaagctgaaattgttaaactgtattcaagtggtaattacacccaacaggaattggctgattggcaaggtgtatcggttgacacaatccgtcgtgttttgaaaaatgctgaagaagctaaacgccctaaagttactattagcggtgatattacagttaaagttaatagcgatgcagttattgctccagttgctaaatctgacattatttggaatgcatctaaaaaattcatttcaattactgttgacggtgtaacttataacgcaactcctaatactcattcaaactttcaggaaattcttaatctgcttgtagcggataagctggaagaagctgcgcaaaaaattaatgttcgtcgcgctgttgaaaaatatatttccggcgatgttcgaattgaaggtggaagcttgttctatcaaaatattgaattgcggtctggtttggttgatcgtattcttgactcgacggaaaaaggcgaaaactttgaattttattttccgttcttggaaaatctgctggaaaacccaagccaaaaagcggtatctcgactctttgatttcttggtagcaaacgatattgaaatcaccgaagatggttacttctatgcttggaaagtagttcgtgacaactactttgactgtcactcaaacacctttgataacagtccgggtaaagtagttaaaatgccacgtactcgtgtgaatgacgatgatacacaaacttgttctcgtggtctgcatgtgtgttctaaatcttatattcgtcactttggcagttcaaccagtcgagttgtaaaagttaaagtacatccgcgtgatgtagtatcaattccgattgattacaacgatgctaaaatgcgtacctgccaatacgaagtagttgaagacgttactgaacaatttaaataagggcttcggcccttatcatattaaggaaaattatgttaggttatcaagcacgagtaaaagaagaatacgatcaattaatgctcaaaattaatgcactgagtaaatttttagaaagcacaaagtttctaacggttagtgcagttgagcaagaactgctactttcgcagtttatctcaatgaaatcttatgctgagtgtctagagaaaagaattgcgcaattcaaataa

SEQ ID NO: 472 - DNA, 27 bp, Artificial Sequence
  Synthetic
agatcggaagagcaagatcggaagagc

SEQ ID NO: 473 - DNA, 26 bp, Escherichia coli
ctttagcagcttaataacctgcttag

SEQ ID NO: 474 - DNA, 26 bp, Escherichia coli
ctttagcagcttggtaacctgcttag

SEQ ID NO: 475 - DNA, 26 bp, Escherichia coli
ctttagcagcttagtaacctgcttag

SEQ ID NO: 476 - DNA, 26 bp, Escherichia coli
ctttagcagcttgataacctgcttag

SEQ ID NO: 477 - DNA, 15 bp, Escherichia coli
cagcttaataacctg

SEQ ID NO: 478 - DNA, 14 bp, Escherichia coli
cagttggtaacctg

SEQ ID NO: 479 - DNA, 15 bp, Escherichia coli
cagcttagtaacctg

SEQ ID NO: 480 - DNA, 15 bp, Escherichia coli
cagcttgataacctg
